United States Patent Application Publication US 2026/0258423 A1 - sequence listing, part 25

SEQ ID NO: 167803 - DNA, 46709983 bp, Homo sapiens (residues 30,027,853-31,696,066 of 46,709,983)
  source 1..46709983: mol_type = genomic DNA
aagtatctgtgtgcctggagccagaagtagggatggacgcgttaaaataaattacagtaacctccccattgtttgttggtttaaacacttcaggcaatggttctgcatgggtatgattacagcattttcctcaattcataattttattcttgaagcttggaatcttatcttctggagtccgtccatatctttgaagctgaaattggaaattctaactgcgatctgagcaaagttccacagctgatttgccttttttttttttcctgaagcaaagtcagttgagaaatcccacactgcagaccttgtcttttctcagtgatttattggctattttgattccatctgcaatggtttgctccgtggtttgtgccaaacattttaaatgcttaagagtcaatcaaaacgctatcttcctcaaggaaaagtcaagtcacccaatctggaacattttatatttcggttgtaaattaagccttaattctgactgtagactggctctcacttcagggatgcaaaacacgaatgatcttttcctgtatctcaaggaccacatgccactgtgttccgccttcaacatgtgtaagaatttctgctgtttgtcaaaatgctaacaggaatgacaccaggaatatcctatagtagtagcttaattttacccccataaaaacatttcattttatgtctcacgtgtttttcatacatgcctattatgtttctttttgttccaaactgattatcagtgtttgactgtaaggtaaataaaataccattaattagggaaaggactaattggtccaatttggagaaatgctgataatcaaattggtgtaccttcttgtattacaagtgacattttgtaacagtttccaggtgttaattatgatgagcttgcatttcaaagaactaattaaggtttcttattgtttcttttgtagccaaacattttaccccaaggctaccaaggaagaaaagacaaaggcagacatctgcaatttttaaagcagcttcttattcctcgctcttcctctatttactaaaaaagaatatgtgtttagagtggagaggggcatgttgggggaaggtggggaagtaagggatggggagagaggagggtgggaggaaaaacaagaccactcacttcttgggttcttggcactccaagaatgatttggtgatagtttgatgagtcatagaaaattttcttggtagatgaacaataaaaatgaatatttattcatttacccatttaagaaatgtttgatgcctagcagaagctaaggcagtgttctaggtactaggacagtagtaataaatgaatagtctttactccccagagacctgcaaaatagtggaggagacaggaatatagagtaggtaagtatgcatgaagaaaatacacaggtagataaacatgtagagaaaataacttatcttttatttcaagatttcaaaattatgaagtaaaagtaatttgtgacttgtgttgagatttatgccctctattagacgaagcctgaaatacgtaagagaaatctagatcagtactgtacaataaaaataggatgtgaatcctgaaggtgagacacattacggaatatgaaatttttcagtagccacatttaaaaaaagtaagaggaagcaggtggaattaattttaatacaatatttaacccaatatacccaaaatactattttaaaatgtcaataaaatagtttctgagatgttgttttacattctacttttgtacaaagtcttcaaaatacaatatacattttatatttacagcatatctcaattcagactaggcacatttcaagtattcaatagccacatgtgtccagtagctgctgtactgcagtgaagtctgtagattatcagttctggttgtcagaacctatctgtccctatgttttctctgtaatatgggctgtcatttagacagatgtttcctacttattattcatttattctacatttaataaatatatgttagttgttaggcatggtgccaggtgctgggggtgttgtcgtgaataaaaacaaaaatctctgcccttacgaagtttatattctagtgggtactattatctaggacaatctcagattccaggtgatatttaagagtgttagcccttttctgctattttattaggcagttttcaccaatgaacatatgctacataatcttactaaaaccaggacctgtcttctctttgaataatttccacacataaaaccccaatatattctttccaattcatatcactatgaatcagaatgaagttgttgcaaatgatggtcagtgaagaagaatagaagggaggttggaaaaagtgaggcttattgcctctaacatttctgccattcttacagtgattggtatgctcgatgtattacaatttgtcctcactttgttagaatcaactttgttatcttaaacagccaatcatatagccaaataacaacatcaacaacaaaaagaagtgttccaaaaccactagcccggtagcaattctaatgcaggtggtaaagaggtatttgatcatgtttattctttggtttcgtttattttaatgcagtctgtctcagacattttctgttgctataacataatacaattgactgggcaaattataaagaaaagaaatttatatctcacagttctggaggttagaaagttcaagagcagagcacggtactggcacccagcgagggccttcttgatgcattgtaacatgctggagggcatcacatgtcaacagggcaagagcacgtgtgtcagctcaagtctgtttccctcttctcataaaactaccagtgtcatcatggaggctccacactgatgaccttatctcatcctaacgacctcccaaagaccccacctccaatcaacgtatgaatttgcagaataagtctccaacacataaaatttggtgaacatattcaaaccatagtatagtccatgagaagatcttctctaatggaaaatttgctaatacagcttgaagccattgtgttcatgtggacttctgttttccagcagtgattcttacccttgggtgaacctgggaatcaactgcttgtgttttagaaattctaatattcaggctaacttcagaccaattaaataagtttgtgtggggtggggccagagcattagtatctttaaagctaccaatatgattgttaagtccggaaaggctgagcaccactgcagcaggcacactccccgttctttttgcctcccattgcattggacattagccattttagcctttgtaatttcctgcccaggaagttaatctaagaactttcttctgttgatgtgaatgtggatgtgagttgcctttcttaactcagttgaggaccatctttccaatttccaaaaaccccttccatcataatcagatgtcacttcaaagtaaattttagtgtcattcacatgacattggatggcagggatatgtccatgttgggcatttaattatgatgcacacctgtttggaacattggggagatggcactcaaatttattacaaactccattgaacttctgaaaccatttagagtctttactattcaagtgtgatgggggaagtagaaacaagggcatctcctggaagcttgttacaaatgcacattctcaggcctcagcctagacctgctgaatcagattctgcattttaacaagatccccaagtggttagtgtgcacattaaaatttgagaagcccttgctgagtgtcagttacagaacatatgtcacaaactgaatcatgatatattcagtgtccatactaattccaagggctctttgattttcatggatttcagcttgtgtgtgctgaagcctgtggcagacaccttgcagacctccaaccgtctctcagctgaagaatctttgttctgaagcaaccaataaaagggatttctttttccttaaagagcaactggggtcaaagcatactggagtgagcttcctggtaagtaagagttctttatattagactccaggtctgttctaattcattcctgctgcttcctttgatgagatatttttcacaccttcattctttctttcatccagatttctcaaccaaatatgcttcccactgaggggttaacaattatacttttattttcttcagcatgggcctgaacgttagcatggctcaccttgaccctgcttttaggcagagcttctccaatctatcagcctctccatttgacagccatttgctccctttaattttttttttagtatcatttacctgaatttgtgaaatatagaaaagcattagatatagacttgcaatgctctgtcctaaatagtaaaatgtaaggtcatttctttcttttttttttttggacacagagtctcactctgtcacccaggctggagtgcagtcatgcgatctcggctcactgcaacctctgcctcccaggttcaagcgattctcctgcctcagtctcccaagtacctgggattacaggtgcctgccaccacacccggctaatgttttgtatttttagtagaaacggggtttcactatgttggccaggctggtcttgaactcctgatctcaggcgatccacccaccttggcctcccaaagtgctggcattatagtcgtgagccaccacgcacggccagaatgtaaggtcatttctaatagaactttcctcttccttatttgctccccttcctggaaagatatttagcttgttcttatcttagtacttcttttctacctctaaaactatgtagtgaagtatgatcaatcaagcttaaaatatcttagttgcaaaggtgagggaaaaaataaaactccacaattttcatttggtaaatctctctctctctttatatatatatatatatatgtgtgtatgtgcgtgtgtgtgtgtgtgtgtgtgtgtatacactgtatatatattcatggattatgacattttcatagatatatactgcatgtatatacagatgaatatagatatagatataaagatagaaaaatagatacatatttatgtacttgcacacacatagctaccctcctctccacctctaaaccacaaagtaactgatatagtgtcgtcttgtgtcagtaattggttatttttttctgattggcatgataactctttccaagttctctggttctagccctgaccactcactgtaggtcaggggaggaggtgatcctggcctcaccatcttcccaatgtatgtcatcttcctggcaacagcatttgtgccaatcagtgatcatgtgacttgagaaaagccaatcccaaggcttccctgagactgaaatttctttctctgctggggattccaagatggggctgttagcagtaatatcgtttactttgtggagaggatctattgcaacagaagaaataaataactcggaggaaagtcaagcagagatgtacaagaatcttagggaattcctgaaacctgccttcctatagcttcctttctctttgacatcctttcccaaattattgttgtggaccaataattgagtcttttgcttatgctgatttgagtaggattttatcacctgtatttgaaagagtctcaaataatgtcagtgtatttctacattcatattcatgcaggatttttctcagccactttgccagttgaggacctccatggccagcgatgtctccacctaagccttgctctacaacaggcctgccacaggaggcaccctgtccactcagccttctgggctatgcctggcttgcacgctggtccgcatcctacactcaccgcggggtccgcgctcagtttgcagctcgtacctgagtttggaagttcccacgttcttgtcccgcctccaagaagaatgaggttatggtgacaatcaaaaagtgaagatgggggagaagaattttactgagcgatggaacagctctcagtggggaggggatgcaagggtggtcccccacccaaagtcgggtggtctttcccatagtgtggctgcatccagggctttcaaggctcagaatgggggagtgcatgctgattggtgtgtgagtatacaaaaaaggctaaaacaaaggcaccactcaaagatgggcatgacattgtaaaaaaccaaatgtgggaggggtagatatatataaaataggtgaaaggtgaggatcaatcagaggagggcggaccaaacaggaagggaggttctcaatctggtccagggctttacttgggacttgtagcttgactttcaggctataaactgtctttggtttgaaggtagagtttcaccagggacctgctcctatctacctagggatttgtttgcctcctgctgctatcaatatttattcaccttctttctattttgatctccatattgccaacaagttcaacatttgtatagcaggttagacttaaatgttagacttaaatttcttaggcaagtaaccaaggaattctcacttaggcaaacaaggaaactgttattggaccaggttagaaattgaactggtttggtgttgaacatactgacgtaaagctagactttcactgggaaaggcaaagaaaggggatttccctgacagcctccagagggaacaccttgaaactgaagtatacttatatagttatcaataccatacttctataagttaatcaatttgtgttgtttttaagccactgagtttgtggtgatttgttttgccagcagtaggaaactaatcacttgtcaactgcctcatctgaatctcagttgtcaagagagaatacccctgatgtgtggcttcttttgcctctccagtaaggcctgaccatatcacttcctgctgtgcggtagtgtcttgaattcccaacctttcatgtctttagggctgagcaggatggaaggatagatcccaccactaacttcggctccctgcctcttttgcccatctctcaactatggcactgccaggccccatcttactgtacagtgcttattagttttcattggctgcagccttcactctgggactaagcttgaatctaagtataagatcttcttctttagggcagtgtttctcatttgctgtaccccagggctgggaagccctgtcctatacatcaccagtttggtagatttgagagagaagaggatttgggggtgatacatttctgtttgcctctggactctgcaacaaactagtagcagaattttgaacaagttgctttatttttgtgagtcacagaatcttccctccttccctcctcttctcctctcctttcttctctcctctcctctcctttctcctctcctttctcctctcctctcccttctcctctcctctcctatctcctttctcctctcctctcctctcctcttctctcctctcctctcctctcctctcttctcctcccctcccctcccttcccttctccttccttccttccttcctctttcccttccctccacttcctttctctcccctcccctcccctctccttcccttcccttttccaaatgtaaaaaaaagataatgtccacctcttcttagtaatgtaagaactctctaactgaacaaacacatacaaaaaatctggattctctgaaagtgttcaacaaaagcttcattaatcacctttcttgaacttagtaacaaaacaaacaaacaaggaaaaacacaattgaaaacttagcaagattaaactgccttaaaagaccaggcattgcactctgtgctaggtctaataaatgaaaacaaaaacagtaacttggtggatacatgttattacatatttgttaaaactcataggttgtacaacacctaaagtgaaccctaatgtaagctatggacctaaggtaataattatgtatcaatgtaggttcatcgattgcaataaatgtagcactctggtgcagaatgttgattgtgagggaggctgggggggtagggggaggaaggagtccatggtagtaaccctctgtactttctgctcaattttgctgtgaacccaaaactgccctaaaacataaaatctttaaaaaattaatgtcatcaaataaatctacaaacccctgagtagaagaaatggatgtcaacgtagtgagtgtgtctcatgggcaagggggtaaattgcagattcagggaaagctggaggaccctttgccttcaactgccttctctttttgtgcacaaaagctaattctttcacaatttcttacaatgtgttatattgtattttccactgaaagccaccagcatacaactatgaatcagaactcatataagggctcataactagggtaacttcttagttcagtctatattgctctggtcccttatctggaatatttgttctcccctaagaacattataaaatctgtttaatgtgttaaaaatcacagtatgctaaatgctatttcttaagaaaattcacccatgttatttcttgttaatatttaaccacaaaaaaaaagataatgtaaaaaaatacatggagagaatattatttcttctgactattggggaaaaagtctctaaagtagagtttttaataatactgagtttggggatgcctcaatcacctccacttaaatccgagaattttttctgtaaagggccagacagtaagtgttttaggtttaatgggtcttgctttctctaggaccactaccgagctctgctgttggaacacaaatgtaatcatagacaatatgtgaacacacgagcatgtgttttaatacaatttttttttttttttttttttttttgagacggaatctcgctctgtcgcccaggctggagtgcagtggcgccatgtcggctcactgcaagctccacctcccgggttcacgtcattctcctgcctcagcctcccgagtagctgggactacaggcgcccgccaccacgcccagctaattttttttttttaatacactgtttttaaaaacaggcttacgggccatagtttgcatacctttgatttaaatccttgtgctaccctttgtcatgtcatacacattgcatattcttcagagcaagcggataactaagtaagaaagcaccttataatccagaaccccaaccatcactgttcttacacttgctcattccgtaattcagaaaacattcatcaaattctagctctgcccataacattgcagaatgtctttttattcctcttttcatccagtattcacgattgccgcccttaattgagcatttctctatctggattcccttcagagcttccagcagccctgagtctgcctcagtgttgtttttttttttttttgctagaggattaatatatatgtatttataatgtatatatacacatattatatatgtatatataatacatgttaaaacgtttacagaatgtttctgctatctataaatgattttaactttcctgcctgtcatatattttatgtaaatactagaataaaaacattttaaaaatacagaaatgtgtgatgaatacaggaaatgccatctgcaattctcccaccatatagatcttagagttttgaactgtatttagtggaaactagtcgctgcctctcagccactagaggactaatatctatgattattagagaagttgaaataaagtgtctttctaatgactctttctcaaagcagatcacaggttgatttagtgaaaccaggtcgtcagtatgcggccaagtgttgctggtgcctgctctaaagcaatatgaggtgggtcacttctcctttcttatcagcagccactcagatctcttcattcgtctttattcaggaagctcttagaatttcccactggtatccttatcctgtccttctaaatttaattctaagaccaaggccacatgttatattggtcagattagttagacccagaaaatatgagagatatcaaaacaatttatttcacttggaaaaacaacactttaagcaaaattcaaactctattatgtccaggaaagcttttggtgacttttccagacttctggtgagtgtagaataattgacaagtggagcttgtttgtccatggagtgaagaagaatgggtgatttagtaaatcacaggctgaaatgcattttaataaacaacttccttattcagttcagcatttgaatgtcttgttgcttactttgatttgaggtctgcaatatctaaatctttttcaagtgtttcacaaaaataacctttccatgtgttactcacccaaagcttcattaattaactctcctgtggtcaaaaggtgaatagaaatgatttgtggcaatcctctcccatggaccaaaagatgccaattatctcccattaaccattcacaaaatcaaagacacaagcacatagaaatgagggatacaaagatagggaagcaggacaaaaaacaccagttactgaactggttgatgaaattgatggattttccttctttttccttttttttttttttttttttttttttttttgagatggagtctcactctgttgcccaggctggagtgcagtggagcgatctcagctcactgcaagctctgcctcctgggttcaagcaattctcctgcctcagcctcccgagtaactgggactatgggcacctgccaccacacccggctaatttttttgtatttttagtagagacggggtttcaccgtgttagccaggatggtctcaatctcctgacctcatgatccgcctgccatgacctcccaaagtgctgggattacaggcatgagccactgcacttggcctctttttccttttataggaagcagaatcacctgcttttgctcattcccaaatatgatttggaaacaagataatgttagctgatctttctctccacttgttaggtgttgcaacacttgtagttctgtcaccctctgatccttggaggactgaagaactttagcagagagggagagtaagagtccatgataaaataaaaataaagagaagaagatgggagaaaagcaacctagaccatctacaacagaacttacagaaaaaagacaagaaagggacaatttatttttacaaaatagttaatattttctcttttggcaagcataatgaatttttattttgcatttttatttggataattttcgatttcccaaatactttagatagtcttaatttttgttatctgtgtactttctcctcaacatgctcagagatactttcttaacttataaaaagaaattagtcctcatttttagatgaaagctcagtttaaagaagtcagagcccccatagacagaaacagagcccgttcttgctgggttggagttacatggagccccccagcaacacccttctcatgtgaaagcacaaaggcagtgactcatgtggtgcatttgaaagattcagaatgccccttcgctgcagaatatcacccttactgttcccagggctgcagtaaagttccttcatttaagtccttttttaaaggataaaatctgatagcaagtaagaaaaacatttacttccttgaatttgctaattatacctccagacaaccacgataaagaagctaaatacatgtgtcataggatggtttcttgtgactgaaatgatggaaggaaaaggagaagaggaaggcaggtgaggactttgctataaacgtttattgatttcaaatgatcccctccctcttttccttcctgctccctagctctctttatctgtccctccttctcccattttccttttcttctccttctccctttttttcttctttcattcttctctttcttccttcaattcttcttcaatattcagtggaaaagccattgcatgggaatgaacacaatggccattgacacaggaggatgaaggaaggcacagcagtctgttggggatgcaggatatgagtatgacaagaagggcacctgtggaaagttggggtgcagggtgtggtaatgaaggtggccaatcagaagtggaaagaagagagcatctgcaggaaggtgaggacagagtagcttggtccacagaaggaggaacagctaaagctaaatcagggtggtttgagcctgattgtggtaagggggacatttgagaaagaggttgcagcaggtggtgaagtgtagggggcaggtcaaagctaggtgggggcagctgtagttaggagcttgggcagagtatcgaatgctgaattaagggtggcatatcccttccactttgggagccaatagtggtccctagcaagttgtcgagattgtgagtaaggaccagaggacacctgttgggaggtatatgacagatcaatggtagattggttacatccaaagacaattcttatagtaaattgatattagaagttaaacagaagccagtttttcactgttgggaatagattaaaaatacagaaatggggaaagttagaaatgaatcttttgtagttgatttagaattggagttattaatgttaacttatacctttcaatacatatttaggtagggataattaatgatgtaaatggcttattgctaaattgttttttttttaattgttgaactgtgagagttcttcatacattccacatacgagtcctgtatcagatgtatctttttcaaatatcttctccaaattctgtgggctatatttttctttcttgataatgtccttgaaagcacaatgcttttagttttgataaattctcagtggctcacacctgtaatcccagcactttgggaggccgaggtgggcagatcgtgaggtcaggagattgagaccgtcctggctaacatggtgaaaccccgtctctactaaaagtacaaaaaattagccaggtgtggtggtgggtgtctgtagtcccagctactcgggaggctgaggcaggagaatggcatgaacccgggaggtggtgtcaggcctctgagcccaagccaagccatcacatcccctgtgacttgcacatatacatccagatggcctgaagtaactgaagatccacaaaagaagtaaaaatagccttaactgatgacaatccaccattgtgatttgttcctgccccaccctaactgatcaatgtactttgtaatctcccccacccttaagaaggttctttgtaattctccccacccttgagaatgtactttgtgagatccacccctgcccgtaaaacattgctcttaacttcaccatctatctcaaaacctataagaactaatgataatccaccaccctttactgactctcttttcggactcagcccgcctgcacccaggtgaaataaacagccatgttgctcacacaaagcctgtttggtggtctcttcacacggacgcacatgaaaggtggagcttgcagtgagccaaggagcaccactgcactccagcctgggcgacagagactccatctcacaaaaaaaaaaaaaaaaaaaaaaaaaaaaagataaattctcatatatatcaacttttctcttttgtcacttgtggttttggtgtcatcttgaagagaccatcacctaacccaaggttacagaaatttatgcctattttttcttctaaggagtattatagttgttggcttttatacttagctctataatatttttgaactaatttttgtagaaggtatgaggtagggattcaacttcattcttgtgtcaacttctttgatgcgtccactagaaattattaattacaggagaactggatacaggaggtggcagggaagactcagtcagtcctcagctccaccatcaatgacccacaataatacataaatcggtgggagtgggcaaggagaagagatagcataacaggcagtgatagcacaacccccaaccccgcaagctacctatagttgggtaacaatttttcaatactttctgataatttttgccttatgatgagagcatttaactcattaatatttaatgtcaatgctgataagacaggatttacatcttccatattgttagttgatttccatgtcttaagtcattttgtgttgttccattctttccttatttccttcttcatattaagaagatatcttctggtatgctttttaaattctgttttttaaaaaattatatttttagttattttcttaatgatttcctgagaaaggacaaacatatatttatactgttttatatgtacttatatagttgctttcatcagtgctatttatttctttatgtagtttagatttactatctaatctctttttatttcagactgaaggactcgttttcatacttcttattgggtaggactgcttgcagcaaattctcagtttttgtttttctggtaatgtcttattttccattcatttttgaaggatagctttgctggctatgattgacaggattttggggtctgccctttcaatatgtcatcccactgtcttttggcctccatcatttgtgggaagaaatcagtggaagaagttaaggaatcttattgaggattccttgtatgtgatgaatcagttttgccttgtttctttcaagattgtctctttgtctttcatcagtttgactatgatgtgtctaggtatggatttgaattcatccaatttgaattcattgaatggatagattaatatttttcatcaaagttgggatgtttttggtcattatttctttaaatattctttgtgtcccttgtttgctctctgtttcccttctgaaatttctatttctattatgcatattttggtaaaattgatggggtttcacagctctcaaaaggtcttttcatttttcttcattcttttttttctgtacctcccaccagacaatttcaactgacatatgttcacttttgttgattctttgctggctcacatatgttgttgagacccttcaatgaattttccatttcctttattgtacttttcaactcaagaatttctattcagttcttttttatattttgcctttttattgatattctctttttcgtgagacattatgctcatacattcctttaattctttaggtgcagtttttggaacatgtactatctgatttaaagattttatttatcaatttcagaagctggacttcttcaagttagtttctattatctgttttttaaaactcatttatggactatagtttcctggggttttttcgccagtcacatacaagtttttatcatgttaaaagctgaacatttttaatattataaaatgataacactagaaatcgaatttttctccctacccaaggttgtctgttgttgctgcttgtttgtttagtcattttccaggactaattctataaagtctgtattccttgtcatgtgcagcccctgaggtctctgctcagcatagaggtcagataattttattagatagaatttttccaaatgccttgaaccaatctgtttactacccattgctgaggcaccaatatgctgacagtgtgtttgaacacattttcatctttatcagttttcaattttatcttgatttttactttctacttgttcagagcctcaagatcagccagaggtgggagattaatgcacatgatttcctgggcacctgtgcatgggctttgagatttccaggaatacagagaatctttgtccagcctctttgcccagttggcatcactgcattaggcagctgcaatgttaagcaattgctgatggattttttttttaaacaaattccctcagataaaacttttctcactgaacaagctcaggtcaagtatagaccaactccatgaatgcaacctttgcaaaaagcgtgaaaatagtgttgattttctggagatagggcttttgggagcttcaagctcattctaactcgcactcaccctgttactgttatttttcctagctaccatgattgtgaggattctggtttttagggctttcatggaattaggaaaagaggaatagagcaagtgcaaacctcacagagctcattgttatttataacattaagctgtttttcttgaataaagctgctcatagtgttgcaaacatttggataatttccacagctcccaaatacttgattttgataaagttttatagtgacctttttgcttttatgcagtggatttttggagttccttgtatgtctaccaactctttagttccttgtatttatcgcttttcattgaccatattcagctcacttaatcgaataagcatagctgcttcattaattagggttcagtggttcttggaatctatacatatttccactgtgatgccataatagctttagtttcttattttttacgttattcattgagctcataccaactatccttacctttcctagtaatatccaaaaatggcatggtcttcttgggaacaagacaaactcccagttgtcttaaattcacctttattttgacttctctattagcagttacattttgttatgtaagctgcatttcatatatatgcttgacaattcacactgcagggagagcttcattatttttccatttccatagaaatggccatcaccactaatttacaaaggaaaatactctccagccttatttattattgacagtggttaatcaggagtaaactaatttttgaaccagtagccaaaggcttatgtgacatcataatcttgaagtaaagtgcaaataatgtagtttatagtgtttattataaaccagtatgcttttttgccccttttccttaaattgaccattatagaagttgcaaaccttcttgctatttttcagtagttgcctaaaataaacatcccccatccttcttgttttccctctctcttttgtctcagcattctttgtttactttcccaataatattttaacctaagagtactaagtcactaatttcaatagctgcagtgctgctttattccacaagagggcactcaaatggctttctttctgtgatattctaatttcccacttttttcatattgtttgttttccacagtggactttgaggacagatctatcccagagtcctccactaaaaccaagaagatacatatatacttataaatgtagttaatttcttggaaacattgaagatttatatgttctagaaatcagaaggtgaaaaggaagagattgagatagaccagtgttttatccatgacaattccacctgctttctcagggaaggctttggactgctagcagacatgactcctgaaaagaaggcgaagcacctggaatatctcatatgcctattcgatcatttccaaactaaatgaagcaagtaaaacttttaaaaaaacaaagcttaggccgggagtggtggctcatacctaatccagcattttgagaggccaaggcatgaggatcacttgagaccaggagctcgagaccagactgggcaacatggtgagatcccctctctattaaaaatcatcatcatcatcatcatcattaaactagaaaaaaataaaactgaaaaaaaaattcaaataggtgaatgcttgagatgactgtacagagatgataaataacaatacctgagttttgtcagaataacaggtagataacatattaagaaaagatttgatttgctggaattaagatggcagaaaaaaatggacacattgtttttattatgtaaaatattacagtatacagctactactagaaagtagatgagcaaaccttaatccaactagagatgattaaaatagttttgtttttctataaatgtagcctgatgtgagggggtaagaaatggagtagggaagtgagtattgaaaggatgagacatgtactcttcagtcatcttagaaactctatgtatttttctgactttatgagaattttcctggcctgcctggtaagagaacaaacattataaatgtcaaatcaggcaatattctaatttgaagataaccaggattgattatagaagaagaatgcctattttttttttttagcgaatattgcagagtagaagtaaactctggcacagaattgccttcgtagcttttatattacacccaaagaattttggtggaagccactatcccttaattttgaatggattctgataataccagaatctatgactatttgataactctctaactactaggagcaaagagctatatcatcatcttgcaagattatcctgcaaagcaaatgtaatattaaaattttgcttattagatgtaattttgggtgtcttttcctttcattttatgcctttatcttggtccataacgattggatggtagctttctaaaacagctattttaatcactatcattgatgcttcttgagcaaccagctagtatgttaataaagaagatcattttcctaaatagagccaatgagtgaaaggtgaaaattatctatggctgagtgagttagaaatcactatcatttgatagattgcctttggacattttgtttttgtaagtctttttgaaaaatgtaatatcactttggggcaatggaattgatagttttaataaaactattaaagactacttatgtctttatatacatttctaaacggaaaaataagaaacatttaactgctttgtgaataatattgacttatagttttttgaatatgtaggaaaaaagtgaagaaagagtacatatttgttttaccacatattttttttactgagcatccgaaagacctgttccacatctgttatttttcagtcatctgtgcttcccatttgagttttcctagcagcatctggaggggtagggagaatcaaagtggtctccttggtagctgatcatcctgctattgcaggttggcaaattctctgcatcaagccaaaacacaaaaaccaattatgaagtctgcagatattttatgtccagctgtttgaaacacatatggcatttattctattcagggtactgcttaattcatagtgtgacacgtggtttgtttgacaaatatctagacctagaccatattttcaagtctctacatctttggaggcatttttaaaatacattcaccatttctgaaattaattaacaaaagagcaaaatagccccaaagacatctatgtctgtgtgtatgggtatgtatgtgtatgtgtatgtgtatgtgtatgtgtatgtgtgtgtctgaagtaattagaatttagtaaaaacattattccaccattactttgtgtttctttttaatgccttatatccttccctcaaaaaaatttatgaatgccactcaagagtaagtggagttttaatattatctcattgcctgcaaggtccagtataacttaagagagaggaaattaatctttgaggttaagtttacttaccatttgatgtcagtgttgtgctataagaacaaaattaataggggtaggagggtgttgctgagggctatgggaataagctactagggaacaaggttaattttaatgtgaaaggtcatcagctttggataactcatcaaaatctaaaaacacaggttttctagtacggcagttcttttatacgaagtcaaccatcatatccaactacctctcatttaaattcagaacttgacacttgtcaaacacaagatgatctttcttttttctttttacttttcaaatgaaagaagctgtgttaaggtgcttgctaatcttagagatctaaagtgcctcccatcattttaaatgaaaacatatgcatactcaatttccagatgaagaaaatcaatttagccatgcataatgaacgaaaccctgtccctccatttaatttctcagttgtttgtgtttacaggcagcctttcttttcaagggcaaatttaataaggacagtttaggaggttataggaaagtggtgtgtgaaatgaaacatgtgaagtgatttcaatctagatctatacttacctgggtctgggattaccagaggtaccaaagggcgcccctcttacaaaacacacataggcatttggtttccagtgctctagccataactttttattaagaatgcataccacgtatttgcttattacatggttaagtagccaccttattcttcaattacacaaaattcaccactgaaaagaaactgtttgaaagaatgtgtttgaaagaatgaatatctttagactggatacctgcactagcttggatattgaagtgtatgtaaactttcagttgaatcaagatagaggcatatgtcagagctgaaagaactttgttgtttattatagttggtttagatctcttatatgcatttacatgagaactccagagtgtcttaggaaagtatagaaattagaccgtagatgcaggaaaatccctcactcaattaaggactcaaatataatcaatactaatgtactagcgataaatacaaagtgtaggaaaacactctttccatagcatttcattctccacttgctgcaaatcaaattacagacatatgcatctaatactaaactacttttgtaaagtgctttcctctttgacacactatctagagtttcttaaagtgacagtttaactgttttgaaatatatatatttttgctgccactttcaactcactaagctatcaaaacgcatctttctcacccatgtttgctatgacacactggaatattaactccaagaggaatatcaataaattcctcctccagaatagcaagtattaaaaggctcaactgtggaggagtgaaaaatccgtacaggcaagtccataacagtaagatcttatacttgaagagtcagaggcaattgaaaccagagtgactccatcttgaatagcagctgggtaaaataaggctaagacctactgggttgcattcccaggaggttagtattctaagtcacaaaataaaataggaggctggcacaagattcaggtcataaggaccttgatgataaaacaggatgcagcaaagaagctggccaaaacccaccaaaaccaagatggcaatgaaagtgacctctagtcatcctcactgctcattatatgctaatcataatacattagcatgctaaaaaacaccctccccagtgccatgacaatttgcaaatgccacggcaacattggaaagttaccctatatggtctaaaaaggggaggaaccttcatttgttggaattgccactcctttcctggaatactcaggaataatccaccccttctttagtatataatcaagaaataactgtaaaaatagccaaccagccaccctaggggctgctctgcctatggagtagccattttttaaatttctttactttcttaataaacctgctttcacttcactctgtggacttgccccaaattctcccttgtgtgagatgcaagaaccccatcttagagtctggatcagcaccccctttctggtaacagaaagaagaacctatactgtaaagcctaaaaataaataaatagtatttaaaataaaaacctatagaatcaagattcgttgtcaggatttggcaacttttctgaggtttttagatccaagataaattgcatagggtgaggattgtggagggaaaagtcagagaacaaaatcgaaagtactactctcagacgttaacatgcacacaaatccctgaggatcttgttataatgcaggttctgattgagttggtcaagggtgggatggcctgagattctctctttttttttttttttttttttttgagatggagtcttgctctgttgcccaggctggagtgcagtgatgtgatcttggctcactgtaacctccgcctcccacgttcaagtgattctcctgcctcagcctccctagtagctgggactacaggtgcgcaccaccatgcccagctaatttttgtatttttagtagagacggggtttcaccatgttggccaggctagcctcaaactcctgaccttgtgatctgcccgccttggcccccgaaagtgctgggattacagtagtgagccaccatgccccgcgagattatgcatttctattaagctcccaggtgctgctgatgctattagtctatagacaacccttggtagcaaaaatctaaggtaaagaatttctgagtgtggcaggccaggtctcactaacgtggggctccatgacaactgattcagcactgagtggttaagttaaatattaaaagctgaaagagccagagcgctcatacaaagggtggaatgtgacaaaagcccaccaagagttttgcctaggtcttttgtgggtcttgaagcatgacaagataacaaaggaattcttaacaggacccatttagggttaaacaaattttattgagagtctgaagacactccctaggcctccacaaacaagtttattgggggtctggaggaactccccaaagctccatgatttaacaggagacaagataagggtaatcaccccagcacctggacccatttagattaagtacatttattgaggctccggaggaaggtcttcaggactcagatctcagttatacatggaaagaagtgaatcgcttatgtctttagatgaatgcacatttacacataggcatatagcttagaaggtatatgagctctggaaaacattgtaattttgagttggtctggcgatattttccaggccttctctctgtaccaggttaccgaaataaaaactctcttctgcggttcatctgcatctcgttattgggccgtgagaataagcagcccaaccctcagtttggtctgggaacaagaggaccgtggaaggtgtggctatgtcataatcatctggggacacataaaaatacagatgcctggaccctatgccacatgctccaattagcagatcttgataaagctctatttttcaaaagaaaacatttcctagaagactctgatagcaaactaggtctgaggactaaataaagtgatattttctccatttcacagctggcaaatgagataatagctaacctgtctataattataatgatgttaattaacccttgaaaatgcgggatgggaatagaggaggattagtattaatataaattcacatctggtatcctccatgcctttgaaatctaccatcatagcgcatggtctcgatggagaaaagattatactatcagaagggtagtatttttttttctttttagaaattgaataatgtgaatagaatgcaatatattttagatactctaagttcatgttctcattatatgcccatatcgcccctgagaggtaagcagtgttatgttttcatagttaagaaactaaagggaaggaatattaagtcaatagcacaaggtcattatgccaaggagcaggagaattagaataaaaacacaggcctctctaccatcagtctcatacttgtgacctgagatccttgcaagctgcaagatatgggtaagccataattgtagaaaatcttaatcaattttttgaaactttggaaattgtccttgtgtgctatttttgacacttcatggtgtaatctttagaaatcgttcacatgttggcataaatctgaacataaaatgattaaagagaaatatattcagagctatctcaacttatctgtggtggtggtgacaatattagagatgtttcacagggatcatgtggtggctggatatcttcatccccccactacaaaagtcacgtatctctgcattattgaagcatggaaaagatcagtgtagcagagagtggtcacagtcataaagcaggacatttaaaactagaccattctcatgtcaacatgagaatgcattttgaagcatatactgaaagcattttgaagcatatactcagagagcaatcctctgtataaatcaggtaaaagagtcttggtacccagagctcttttaacattaccatgcatgtggattaataatgttttgcaaatctaagtaagaatcaaggttgtcttgggacacagaaatggaatccatgggccagatgttcatctagtgaatagctctcatagttctttgatttgaggtgagaggacaaaaagaagctttattaattaagtgagagctgcatagaacaacaaccaaccaaaagcaaaatcttattttccttttactatcccagacggcttccatcctaaacgtaactcaaagtggtataatttagtggactttggagccaaaatgcttggctttgagtccctgctctgccccttcctaactgtgtgacctggaaaaatgacctagcctcagcttctgtattcataaaatgcaaatgaagcagtaggccgaatttggctgttgtaagaatagaatgagttaatatcttgtaacattctgagaatagtgcctggctcgcagtaagtagcatttgaatattagacatgatgagtgtaaactatgtgaagatcctaggcgctgtggagtacataaagattgtccctaccccaagggatatttagaatttttaaaaaataactgatattctctctctagcatctatatcatgatttacaaagctgaaagtcactttctttttggaaatgagtgtttagaaaataataatatagtgagcatgagcatttggtggcaaaagagttcaatatcctgttatctggctatctgctgtggtttaaaaaaaaagcagggagatgggaaaggatgggggcagactcagaatcatgttttggaaaagctctgagtcctaccaagttgccaagaaaataatttagcacagaagtgaattattcaaccctgatgtattattggtccttgttgtcagggctaatgcaatgtttctatctaatttgtttagcacaggcatttttgccttaatgcatgcctgccctgtagactagtgtaacagtcatctcccccacaaacagcctgaaaagaatttaagtgaattttacattgacctcttcctagtggccttgtaaagtctcaagagtcttactggagaatagaaatacagatagttgtccacttccatggacttgtggagagcaattacctactgcctttggaaatatcttttaatattaaatgttttctcaaaatcagtattgttattagaaatcccagaaatacttccctaaactattatgacttacagccacttcattataaaaatcatgaccctctaatatgtactgaccagacaacatccttccccatatctaagacacaaagatctccgctatagagttcatcaatgtatgggggatgacctgcaaaaacaggggaaaatggtaactttaaaagttatttaaaattaaccagcattgttattaagtataaagcaccatgctctgatgttttacatatgatggtgaataatgaataatactgtaatctaagttttaagaagtttaacctagtttgtgaatttagatatccaaagtttagatttttcacaatagaaatgttaaatcagtggcattcaaatatttttcttccttagaactatttctcaaataagatcttcagagaaagcctaataagtaaaagagatacatttacagtggttctgattggagcagtagggggtgaaactctgtctgatttccacctgccaacatccttcatttgaaaaacctccaaaaagcacagtttgaaaaccactgatttcattaacaattcaagacatcacagaagaaatgctgtgatactctagagaatttcagaaaacactgcagattgccttcctagcatcctctctgccatcttccacctttctaacagtgcctggtcttcaggtccttcctcctccaggtggtcatgggtctcaggagaggctgctttgtctccagaacagataagtgagtcctgattggactaaaccatagattctcaaactctttgtcctaagactccttgccactcacaaaaactgaggactccccaaacagcttttagattatatctaatatttaacatatttgaaacgaaaacagaaatgttgaaaatattcattaaacatttaataacaaaaataaggccattattacattaacataaataacattttataaaaactgacatattttccaaaacaaatacaattagtttaaaaagtggcattgttttctcttccttttaattttcattttaagttcagtagtacttgctcaggtttgttaggcaaacttgtgtcatgggtgtgtgttatacagattatttcataacccaggtattaagcctagtacccgttagttatttttccagatcctctctctctaactaccttccacccttcaatagaacccagtgggtattgtttcctctatgtgtccatgtgttctcatcattaagctcccacttataagtgagaacatgtggtatttggttttttggtttctgtgttagtttgctgaggataatggcctctagttccttccatgtctctgcaaaggatgtgacctcattcttatttatggctacatagtattccatgttgtacatgtaccacattttctttagccagtctattattgatgagcatttaattccacatctttactattgtaaatagtgttgtgatgaatagacatgagcatgtgtctttataacagaatgatttatattcccttgggtatatacccagcaatgggatcactgagttgaatggtatttctgttgttaggtctttgatgaatcaccacagtgacttccacaatggttgaactaatttacactcccaccaacagtgtagtagtgttcctttttctttacaacctcactagcatctgttattttttgacttttcaataacggccattgtgactggtgtgagagggtgtctcattgtggttttgatttgcatttctctaacgatcagtgatgttgagctgtttttttcacgtttgttggtcacacgcatgtcttcttttgaaaagtgtctgttcatgtgctttgcccactaaaaaagtggcattgttttctatttttgcaaatctctttagtggcagccttaatagaggatagctagattcttgtatctaccttgcattcaatctgctgtattgtgtagtttgggttgaagaatatgaaaagaaacccctcaactgtggcctatacagttatgttattggaaagggagaaacagttcaatagctttttaatataattatagtattcttggccaggtaagtggcttacgcctgtaatcctgtaatcccagcactttgagaggccaaggtgggggattacgaggtcaggagttcgagaccagcctgaccaacatagtgaaaccccgtctctaccaaaaatacaaaaatttgccaggcatggtggtgggcacctatacgcccagctacttgggaggctgagacagggaaatggcatgaaccctggaggtggaggttgcagtgagctaagtcgcgccactgcactctagcctgggtgacagagcgagactcaatctcaaaaaaaaaaaaaaaattatagtattcttatctgacagaacaccaaaatttaaccagtgaccatttcctaacaatagtgttgtgaaagccacaaacatctcgatgaacatttcagtcttggttacattaaaatctcttgcactgtattggatattttacctgttcataattttataacaataggcattcatcatttggaaaatactggctcaatgagtgacatagatcttccaaatgttgacatatttcatttacaatgtgaaaagaaatcacattcattaatgtcatcatcaatctcatcagaaaagtctgttagtattgggaagctgtccagctcatggtggcagaagaaaagctttcccaaattcaaatttttacttgaaagctcatattttatcattgtcaaaaataatgtcagttgttttcctcaaagtcatgggctcaattcgttcatttgtgagaaaatatgtgccaaatacttaagtttgaatcacataatttgtccatcagtttttcattcaaggaaaaataatggtctaggaaaatagtagatgattcagcttctaactgaaagaattgcagaagggctttcctaaacagaatcaccattcctgggtgtgcaacagaagtgttttgttatacattttctattttttcacataaaataataaaaagacagaatcaagggacaaagtttaataaattaataatttttagtgctttatcaggtcttttctagtaaagcaaccttttaaattatttgcctaatttaattaaaaaaaacacgtggtagtgaagaacacagtgactgcttatgcaatttggtgtcgttttattggtgtgaagcattttactcaccattgccttttcactatcgctggaaatctcaacaaagcaaaaagggcaaataacatcatgggattattagaataatagttttcattttgccaagaccccgaatggttttgaggacacccaggtatctgcagaccccacactgtgaacttctggtgtaaggtaattgtgaatatcccattcataggccagtcagtaaatggtgtaagattcaactctggccagtgagatataaaggacatatgctatgaattttctgggaaagatggccttgctcatagaaagacattggctgaggtagacttcttcttttggatttgtccattacctgtaccttgaactgtggcagccaccctctacatagataaactagtctgtgatgaagtcaccatgaagagaatggcatgtttgtatttatttttagttaggtcttttcccaggcccagtatctgtgatttgctgtacataacagctggggctctattgtttcttgagagaagcaatttcaaaaagcttaagatgcagcaagaaacttgatccttgatggtgtatgaagccactgaaataaataacctcagggccattataacttaaattgttttgctttgggatttagtaaatttcctttttggttttcttattgcttataatcaaaaccatcccatctggtactgagggatacattcttattttccatttggctgcagccacattattagggaagaaaagctagtctactaactaccaaaggaaaaatctcagggtttatataaactttaaaatcaatatcatgtaagaaaagaaataaatgatgatagctacaatattttgaacttttttatttttaatttttgtgggtacatagtaggtatatatacttatgggatacctgagatgcaatgtggaataatcacattatggagaatgggatatccatcttgcttagcatttatcctttgtgttacaagaaatccaatatattttgaactttaaaatggagcttgtttgagcagatggctccatctaacaatacccagctgactagagactccttggagggcactgcattagtccattctcacactgctaataaaaacatacctgagactgggtaatttataaaggaaaaaggtttaattgacttacagttcagcatggcaggggaggcctcaggaaacttacaatcatggtggaaggggaagcaaacacatccttcttcacatggtggcagcaaggagaagtgcagagtgaaggctgggggagggagaagccccttataaaaccatcagatcttgtgagaacttgctccctctcacaagaacagcatggaggtaactgccctcatgattcaattaccttcctccagggccctcccaccactcgtgggaattacgggaactacaattcaagataagatttgagtggagacatagccaaaccatgttaagcaccatgttgtgtccagtgaaaaaattaattatgccacaagaaaaatcagaccaaaaaggaaaaaaatacgaagtttaattaatctaagtcatagttattaaggttctccccttcttgaacatattaaacaattttctatgaagcagttttcttataaagtaagtgcagtcacttcatgtggtattttgttgttgttgttgttgttaaccacagattaaaactggaagaggccatgtgacatttgatttccagtcaaactgtgaaagaaaacaaatatgtgaatgctaaaatgtgttttgggtgaaaatatcatttgagcaaaaatattgtagattgtaacttccaacatgtctgtcattattcattaatttattccaaattttctaatacctgggaagcaaagtaatatcttgaattataaaataggcaaaacgaatgacatttagaatcatcactttagtatattgatcccatccctcatgaaaagaaaaagtgggccaggctggtggctcacgcctgtaatcccagcacttttgggaggccgaggcaggcgaatcacgaggtcaggagttcaagaccagcatggccaacatggtgaaaccccatctctactaaaaatacaaaaattagccgggcttgatagggggcgcctgtaatcccagctactaagaggctgagggaggagaatcgcttgaactccggaggcggaggttgcggtgagctgagatcacgccactgcactccagcctgagtgacaaaggaagatcttatcaccaaaaaaaaaaattgtctcttgtcccccctaaccactgcttacattaatacaagatgatgccttaagcctaagaacaaaattatgactaacggctgggcgcagttgttcatgcctgtaatcccagcactttgggaggctgaggtgggtggatcacttaaggtcaggagttcgacaccagcctggccaacatagtgaaatcccatctctactcaaaatacaaaaattagctgggcatgatggcacacacctgtaatctcagctactcaggaggctgaggcaggagaatcacttgaactcgggaggcagaggttgcagtgagccgaggtcatgccactgcactccagcatgggtgacagagcaagactccatcttaaaaaaaaaaaaaaaaagaaaaggaaaagtattcagcaaaccataccattgagttgatgagcttccttcttttatgttttctagaagccaaattactgtttgaaaataatcgtaacattcaactttgttattaaaacatggctcattaaatgtcgttgccaatcacctagagagataatatctgaatcacctttgaaaatactttgtaactacagggttctaaaaaaatttcattttttgttgcccatatatttttttaactgtattatattgaataggcatattccatgagaataactacaaaattatggaattacacttttaaaacctaagaatacatattttatttatttatttattgttagtttaggtttggaggtacttgtgaaagtttgttacataggtaaatgtgtgtcatgggggtttgttgtacagattatttcatcacccaggtattaagcccagtactcaagaggcctcttttctgctcctctccttcctcccaccctccctctcaagtgcaccccagtttccttgtttgtgttcgtaagttcttatcatttggctcctactcataagtgagaacatgtggtatctggtttcctgttcctgtgttgacttgctaaggataatgacctccagctccattcacattcctgcagaagccatgatcttgtttttttttaatggctgcatagtaaagaatacatttttaattcagtatgtttgaaaaaattagttattcctgtacttaatatatatatatatactaagactaatgccttctaagcttaatactatatttcttcttatgtataattatacattttttgttttattatttttttcatctataaaatgagtgaattgttccagcttaataatcttttgtacttcactagtaagctagttgaaagctaattttcattcccagatacggattttcctacaaaaatctaacaaattagtctgtattaagataaaattaggtgatcaaagtgtgagagtgttatctacacaagacatctgatgagcacagccacatgtaattcttcatattagcctaatcctttctagggagattaaccagtacttagaaagtgttaagctccaaactcacctcttaatgttctgaaagcaagagaagtaagctaaaatttatacagaatttaccacgtgtaaggagctcttcatagtctacctaattgattccccagaattaccctagaaggatagtgtagtttctgacagaaactgtttgatgtaggccacagtaaaggtcaccgaagaaaaaaagtctgatgctttaagtatagaagagtaaaataattttgaaaatagccaggatgggggaactgaaggatcacagaggctcagcagagactgctctgtcttctggtccaccaaaattgtcctgtttacttctgttttgtccttaaaataatctgttttataagataacattcttttaatgtcctcaacgttaaaacaaaacatctcctccgccccccaaaaagttctttttattttttattttgatcagagaaaagccccaaatgacattaataacccacgaataatcgttctccatggctagaacatgttaaaagcctttgatcctctttcaaaggaacaaaacacaatcccactaaaagtgtcatgtggctgttttgctcttgcatacagcaaggaaatgaacctcagtgttgtgcaagcaagttttgcctgaaattaattttgagcttaactatctatttaggctgtaacagaaatgggtctggagtaaacaaggaaaagccacttgaattacatctcggcctctgaagattctaatttgcttggttgcaagtctcatccctcctttccgggagatgatagctgcaatgctgcacacagggcaaatggagatctagaacgagttgacagcgctatttgaaaactcacttcttatatttaattcctggtttttgttctattttcttttcttttttttttcttttttttttttttgagacagtgtctgactgtcgcccaggctggagtgtggtggtgcaatcttggctcactgcaagctctgcctcccaggttcacgccattctccttcctcagcctcctgtgtagctgggactacaggcgcccaccaccacgcccggctaattttttgtatttttagtagagacagggtttcaccgggttagccaggatggtcttgatctcctgacctcgtgatccgcccgtctcagcctcccaaagtgctgagattacaggcgtgagccaccgcgcccggcctttttgttctattttcaaaatgaggtcacttcttcaaaaagagtctaaaagtaacagctgtcatgttatacaaactttctttttatcttccttcctttttactttgacatcttcccctcttcatgccagtgtggttctctattaattctgccaatcattaacctagtctctcagctcttcttcacagtattggcacagtttatctttcaatcatgtcaatgaacaaatatatttcactacaggaagatgtttggctatttcaatgtggtaatgaaagcaaatgcaacgtggctcctcctttattccagccttgccagtgagtatggttcctctgccacacagtcttcatgggagggctactcttcacctactgttgttgaataaaccctgtgttctctcacttctaagccagaaggccttttttgtatatctacctgtcctgcaaagatcaattcaaattctgcctctgccgagaaacttcatcccaaccaacccaagggcgcatgaatctctctttcccataataatatgctactttgtttatctctctgatttagtatttatcacagtcttccttgagactgagttatttatgagagcttctctcttggtgaagtataagaggtcaaggaccatgtataatttatacagtcaaacccccaaatgctcagcataatcctctgcacatagtatccacaaacaagtgtgtgttgaaacaaactgcattgaatttagaatacttttaaatttgaattactcttacattcaacctcaagaacaaggtaaataatttaaaaagctaaatatacttttgacttcttttgtagtaattttggatatcacattctcaaaatcgcttgtcaaagcgttagggtcaaaataaattttgggacctcactctttctcatctagctagtttcatttgttcatttgttcttctagctagtttccatccactctaatgaaagggggtagaatcttatttttccccaaattttcctcagatggctcatttattaataactcaatattctaagtgcggcctgtgaagcaacagcaacaacaccacctaggaacttgttagaaatgcaaaatcttaggccaaatcaagacctactgaaccagaatctacattttatcaagatacccaggtggctttcatatgtaagtttgaaggccgggtgcggtggttcatgcttgtaatcccagcactttgggaggccaaggcaagtgaaccacctgagttcgggagttcaagaccagcctgaccaacatgaagaaaccccgactctactaaaaatacaaaattagctgggcgtggtggcacatgcctgtaatcccagctattcaggaggctgagtcaggagaatcacttgaacccgggaggtggaggttgtggtgaggctagattgagccactgcactccagcctggggaacgagagtgaaactctgtctcaaaaataaaaataaaataaaataaaataaaataaaataaaataaaataaaataaaaagaggtttgagaagcactgctatcatatcatgtatgtatttcctaaggcacccctccaccccctccccacccaacgccaatcatgtgtgccacacacacacaattgcctgaagcaattgctggtttctagaaaattaagagttagtaaacaattctgattttggttttaattagaagagctacacttgggtggggactggaggatgccttctttattcaatcttattctcttacttttgtgttttgactatttttatcattttaaaagctcagtacaaggttaagtaaaacattattttctatctgtgaaacaagaataactagatatttaaagctatacatttaggctttctgttcttcaagggttatttcttcttttctaggcttcatgcttatgattttcatagctttgttaaaataaatggtcctgttgtcttgtatctcagtagtaaaaacaggataaacttacacttcctattacagaaaataaaatattcactgactaccaactatgtatcaagaattcaactctgtatttttctcataatcaggtagacttcattttttcccccgaatatacaggcaaaggaaatgagacccagatggactgagcaatttgctcaagatcatatttgaactcatccatttgacctctcaatttctgtcctttctaacacattcatttgcccaactcacatctacttattgggcatctagaattttccaggcactgtgttaggagtaagacacatatagatttttgccttcatggggcctacattatactaggataatttgagaaaaataaataaaaagcaaaaatgagttagttacggcatttatgataagtgctttgaagaagagttttagaatgcaatgaaactgtacaacatgggacttaatttgagaagcagagaagactttcctgaaatgatgaatagtaatgaaccaagtaagatggctaagtaagtgagggaaggatactatcttacaaagacaagcatgagcacgtataataccttggagctgaaagaggcactggtctattaccacactggagagttatttctaaattctgggaattgattcaatgtttgagaaataaaattccagcttttccatttgcatgctttgagatttctctaattcctagtttcctttgcaaatctggataaaaaccctcataataataacatcacaacaacaagtcagcgataataatgtctattccaaagtgtctggcagataatgggtactcaatggatatttaacaataaatgaatgatggttgtgatgactaaataatataataaatgtggaaagccataattgttcatttagccattcatttgtttactattaatataaatatttattgagttctttttgtaggcctagtaatatatagttaaataaaaatatctttgttatataagtggtagtttttcttcttgcttttttaaatgttataaaattaataaaggatctgtaaatgttaatggatccctgagttgcagcactcacatgcttttgtaaaagtttaccatttagatcaaaactctgggaagtatatattttgaaattcacagccagagtatttcctcataatttaagttttagctgttattaatcatggtttcaagtaaccaaggctttcctaactttataaaatgaaaaatctgactataattatgaataatacaactgtaccctgggaagctgatgttcagatattgtcatgctgagaaaagcagcccagccagcctcttatcctagaacatcatattctgtcccacatggttttacccctccggttataaccaattgaaccacggatagacaactgactcaacattagccaatgatctatgaagtggccaaaggtgaaacctttgtagggtaccttatgtgggatggtgagtgctaaaaccaagcaaggcctctcatttggaatatgaatgtaggagtaacagaaaatgagtacttgctcaatacgagtggagagaatagaagtggagaaggtagccaataagaacatcagtgttttagggggtacttactatggttctagtgaagtcccagagttgatgtcaaatgagtagtggtatagatgatttcataaattcagttctcaatttatactccaatcttgaagaaacttgactatttagaaattcagttttttcccccataagaattggccaggtgatgatactgaatttttacattttccacataactttcaacaagtgtcagtttattacgttaatataatttaagaaagcctaaatggtgtactatacctacttcaaatttctaagtcaggaacccatgttattactagttttacagaaaatgtcaaaagttactttagaacaactttatttcaatagtgatttccaactttccttcaattaaactatcaccagaaaaatctgtaactgctacaaattttcagagaaaagttactattctactcataggtgtgtggtatcaagtgaaacactattttatgccacatatacatgaacatgcatgcagcagtgttttcaactggcagcattttgcctaacactaaccttgctgacttcaactcagtacaaggttaagtaaaatattatattctatttgtgaaacaagaataactagatatttaaagctatacatttaagttttctgttcttcaagggttatttcttctttgctaggcttcatgcttatgattcagcttcatgcttatggtactaggcttcaagtttatgattcagcttcatgctaatggtattaggcttcatgcttatggtactaggtttcatgcttatggtactaggcttcgtgcttatggtattgggcttcatgcttatggtattgggcttcatgcttatagtattgggcttcatgcttatggtactaggcttcgtgcttatggtattaggcttcatgcttatgattcagcttcatgcttatgatattaggcttatacttatggtactaggcttcatgcttatggtactaggcttcatgcttatggtattaagcttcatacttatggtactaggcttcatgcttatggtattaggcttcatgcttatggtactaggtttcatgcttatggtactaggcttcgtgcttatggtactaggcttcatgcttatggtattaggcttcatgcttttgattcagtttcatgcttatggtattaggcttcatgcttatggtactaggtttcatgcttatggtactaggcttcatgcttatggtactaggcttcgtgcttatggtactaggcttcatgcttatggtattcagatggtggttaatcaccattccagtggttctgacctgtaaatcactagcaaccacaacagatcttcagcataatctcaaacttgtttatatgtatttcaaataaaagatgcctcattttctttccaaaaattacaaaacaaaacaaaacaataacagtaccagactaccatgtttttaaatagtaatttattaaagtgtctatatatttcaacttaaaatatgaagtgggaaaggaaatgagctctcgatattatagttcccatgttaagtatatttcatttcataaaataactttggatcccattttgtcaacaaataaattttgaagaagttaaaaaacatttaaaataaataacaacagcaataatttcaataagttaaagaaaaatcgaagacaaacaagactattgtgtctgacttagatgtatagcatttgagtgcaaaacaataaagaaagtaatatccacaaaagtcaggctagtagttaatctttgagattaaccaaatgggatcatagttggatgaagaaatgtgaatatctttgggatgacttgcaatattcttatttcctgagatgagtggtagttatatcagttatcattttataataattcattgagtggtttgttttttgcagctttctgcatttatgtaatatttaacaacagaaaagtgtttctaaaatatgattttgttcaaaataacattttgccttaaagaactgtgatttactaatgtatgcaaaataagaggtccagaagtaagcagtttcaggttgggataattttgttttagtgatgtggggatttagggtcaacttctctcccattctctaagattctccctcatctttgaaagatggtggactcaacaccaaaacacacctatgtacacctgctagaagcctgagagaaggagcgtgggagtaaaataatctttatatgacctcctttcattttctgaatgagttagtgtgagattattgccacttgctcatttaaggtttataataacttagtggaacatctgggtgtataatttttttgtgggaagactgatttaaaccattttatttaattactggatatatggctaattagagaattttaaatctcttgttgtttctgtagttttatttttcaaagagtttagccatttattatagatattaaaattgttggtataatgctgatgttaatattctcttttaatccttttaatgttggtaggatctgaaataattactcctcttttgtcaatgattttggtaatttctatttattccacttttaaaaattaatagaactagaggtttctaattgtattgatcttacaaagtatcaaaattgcctttgttagctttctctaaaatttctttttcatttcattgatttttgctatttgttatttcctacctttcacttgctttgaaattacttttgtttcctaccttcttaagatgaaatcttaattcacttaattttagacttcaaaactttttaaatacagcaaatctagtatttttcttaaaacattggctattttatttctaaattttttatttggttcattttttaatactttctgttccactgctgagatttaccatcctttcatttattttattttattttatttttgagatcaagtctcactcagtctgtggcccaggctggagtgcagtcgcacgatcttggctcactgcaacctctgcctccctgattcaagtgattatcctgcttcagcctctcaagtagctgggattacaggtgtgcaccaccacacccagctaattcatttattacaaacttatttcctttatctcattgaactggttatactagctattcaaacatttttttcgtgccaattcaatatctgagataccttggaattgttctatattaattgtttcttcttttggaaagtagacattttactcgttgtttttatgttgcacacttctggatcatgtcctgaatttgtgatttacattattttgaaggctctggatctttttatattgctccagaaaatgtttttgttgtttttgctgttattgttgttttggtattcagtttactttgttggactcaaactgcaagctgtgtcttttcagcaataggtcaaatttcagtttagttattttattcttagctggattcctctgaatatgaggtgcatatgtgtggtttaggtatgagctggaaatttgggtagagtttatactcaaaatgtgagtctgccgttctctatgcctcttttctttcctggatatctccctcacattctagaagctaaggttgccatgaagtctgccctttggttctttaggccaggaattctgtgaattttctattgaaattttggccaccatgggcaatagtaactgacgcttgcaggctaaaggctaaaattggagctaacacaatgttgtttccttcttctctgtgtccatttacctccagattttgcctgttctatttacacttcagggacttccaggctattccttttggtattttgtctggagttaatatttgctgtgtgtgagagggccagtggagtcagcatttaattggcaacagtataaatggaacttatgcctattagcaatcaagtaagaagctctagtggacaactttttatttgcagctgtctataattttgtcacatgtccctcctttcatcaattacggttcatccttagggttgcggggaagagcatgacttccttaagcacatttttttccctataaattatcaggaataagtaaggggggaactgccattggcataacaatcaatagcctctgggagtcacttcctcatagatgcagagatttgtttttctttcccttccttgaattaggaagaaatgatgttttgaatcagattgtagatggataacttcagcaaatcattagacaaacataaattcctactaaattaagttcttctatgaggttctgcttagaacagacccaataacatccccaggattggcagaaaatcagacaattgagtcttgattctcaacttaaatactttgcaatgcttaactaggcacgaggcattataccttcacctcatagaggaacttgccactttcactttacagatgcaacgaagaatagggtttcttatagatggtcacataaaaaatgaaaacacagtaggaagaacaatatcttttatgcctgggattctttgaaaataacaaaatacgtaagataaaaattgtgtcctagaagtgtttacaatccttcaggggagaaaacaaatttcaaagaaaggctgaataatatgttttagagaagcatatgcaatataacttcatgtgcaaggaagaagaaataattaaatctggcagagagtcttgaaggatatttttaatctacaatatttgagcaggatcacaaaagatgatttattgtgataagtgaattaggaaaggatattacagcctgaggaagaatcatgaactaatcatggaagcattgatgtgctgagtgttcaaataacatcaactactgcactgtgacaacagtatcacaaaaatcttaatgaaccagtgagaagtaagaatgtacaatcatttggggaacatatcagggaaatccttgaacacagggctaagcatttgaatataaaaacattgtttcagaattctgtatccatgtggctacacagatacacacacatttaataagaggcaatttatgaaaagcactaaggttgcagctaagaaaacaggagtagtagtttaaagaataaagatgacatttctggtttggataaccaaggagagcttttagaagggaatagaagttgaattcagccttggaattttgagcagaatgttgaaaatgttgacatgtagagctgggtggccatggaagatgaaattggagggaggacacacatttcaaagcccacatgaattagacgggtagaaaaaagaccacactgcttaaattgtgagagattctgaatgcatgagacattattagaatagtaaagctactgtatttcatctcaacttagatgccattaataatttgtaccattatttcacgtaatagtaaatggggagaaggatatcaattagagtattaattagagttattaattgtaactctaagatgttgaaatatgaaaaattacataaataagaagcggaatatctaaacaactctttttatctacattttgccatgaaaatatttagttttttaaaattatcttcaaataaacaattcattggaaagatataaatgtcaacttacataaaatttaattgctatcctttagaataattttgccaaaaacgcagcaagagttgaatacaacacaactttatgaaacagcaggcaagaacaaaatgttaatgttcctatgtgcttggaaaatgatgagggaataaaatgggtccattcaactcacttgggtgatgcttatatcacggcataagggttcttttggtacctttgctgaatttcaacaattctattcactgggcattgccagaaaactgacagaaagccagttacagttttcttttctcaattaccctattttcttccattcactcagaaagtaacaaccttgggagactaagattttacactgtaagttcaaacttccaattaaaagccactctctctataactctgacatgtttttctttatttttcccataaattagtgaatttgcaggcttaacttttacataatggctccaagggtcttaccacatatcatttattctgacagtttggggaaaaaaacagttgatttttttttttaatcaaaataaaaaggcaaaaccatcattatatttctggaagcaatagggatcacacaggttgtagtgcagtcttagagagctgaacagcttttaggtagttatcattttgctttatttttgcattaattcacaaattcataaaagtcgagtagattagattttacttttctttcttggaaaatgacaaacatgtttctttccaaatagatacaaattttaaaagtgcagctaatgaagaattaacagctgtcaaattataagtagatttcattcattaattagtttctgtccagggcacgcatacagacatttcaataaacatgaatattgaaactaagaagctatgtctgggaggctatgcgattagcacatgaaacttcatttagagaattaggaagtcctagaaaactcttgatttgtcagttatatggctatgtgacactgaatccattataaagaaatattaaatatctgtcagatatttgatttacatagtaccaactaaacaatgtgtttggtttttcattgaaatgtttaaagactgcaaaatcctcgtgccgcagttacatctctaattcaaggttaaacgttcaaaataattcttatcgaaataatatgagattatgcattttaaagtttcattcctctttttccttacagattatacaaatctttatgtatatgttccaagaatttagaataagatatgtgtatctaacttagttaacttgtaaggaaagcaccaaataccagatttatattgtctgataccattccagttgaagatatttttgtgaattttaaaaataacaaaaagatatattatgcctatatgcaatttatatgaaatctttacaattctttttttattgtcaatccctctcatcttaaaagagagaaatgtattaacttcatttccatggattttcatttccctagcgtgtcaccacataaaagtactgttgaagcatgaggtaggtggataacaaattagagaatacactaatttgtatgcatgcaataaaaatctcaactcaaactatcttacatagtggagaaaatacattattgaacagagggaggtatactaacacagggcagctcccaagctggcgaatttagtggctcaatgacttcatcaggagtccaagtgctttctgtacttatactcttttttttttttttgacggagtctcgctctgtcgcccaggctggagtgcagtggtgcgatcttggctcactgcaagctccgcctcccgggttcacgctattcttctgcctcagcctcccgagtagctgggactagagacgcccgccaccatgcctggctaaatttttgtatttttagtagagacggggtttcaccgtgctgtccttatactcttgccatacttcgtggattggctctctctgcaggggagctccccttgtgatttctgctgcaggtccattgctcatgtgaaaacctgagaaattccaggaaaagaagagacgtgcctttctccagtgttgtttttatgggagatgggggcaggcaagccatctttccaagaagcctccagcattcttctctatttctttaatgagcagaatttctcatgtgctcattattaaactgagcactgaggagcaagaagagatggtcacggctgcttaatgaagcacgtgatcgtgggaagacgttgggatgctgagtaacaaggatgctctgtaagtaagaaagggtgggccgaacaggagagacaaaaagaaaacagaggacaagttccaaacaccacaaatgaacacgttttctttcaaaagttgcatatatttatccaatatgtcttgtgtaaccagaatcaggcagtctcttgactcactaggccatgatcccaaacgtctaccagtcttaccatgcttcatttgatactaccctattttttcctatgttgttttggcttattatttactgtctttaatacataccttacctcactaattagtgcattatcttccttgctctttcccttcctttttcttccctttacccatcctcttttatttacattttttactggccacttgcttattttgatacctcaagatgctaatagaccttaaagctctgtatgcctttctcaaagaacaggagtaaatcctttcatatgtgccttccctgtgtttagcacatgctaatttcgttgcaggttctcaaggaaatgcttgctgaagactgcatacattgaaaaggccagagggtggcaccgtggtgaaccaagcctggtgacgccctcaagtcccagtgctgcaagttgctgctgattcacttctccaatgagtccacattttagtattcgatggtctaggaattatcatgcacatgtaacttggtctaaactagaacagattctttactaccaggatttacatttctgatgttttagttattctggtttataagagtcttcagagaattcctggttttgttaccatttagcctgtttccatccttgtcaaaatatttgtcttgactattaagacagaataaggaagttatctgtgtgatgtagctgaaagggttaaatttcttggtcacttaatcagagaatccaaaatgtttgttcttcatttttggaaggcaaggagcttcacttagcctgaaaatattcatcagtaaacaaatagaattaataatattaatgccaggtatgaaaaggagggcttttcccataagggaaaggatatactcggctagtgatagcggaaacccggcagtagtgtacaatccagtcccaggcatatggctcaagtctgctgccaaatcacacaacttgaagctatcaggtggcactgcctttgttagtggatagtgccatcttcatacaccatgggcagtgacacttctattcccctgtcccgtctctcagagcttgttcatcctcaggccttttataccaatatgtgtattgatgatccttttaaataatactaggatgtacaggttgagagcaagatagcgtgagttaacattttcatagaaacagaactgagacataaaaagcattagcagactatatgttttagctcattctagttgttataacaaaataccatagactgggtggcttataaacaagagaaatttattctcacagtccacagtctgacaagtgcaagatgaaggcactggaagattcattatcaagtgaaggctcgcttcttggttcatagaaggcatctccttgctccatcctcatatgatggaagaggcaaacaacctcccttgagcctcatttaataaggacactaataccatgcgtgagggctccaccttcattacataatcatctctcaaaaacccacctcttaaaaccatcaccatgagggttagaatttcagcccatgaattttagagggtacaaacattcagactatagcactatgccttcattttgggagcccaaatctttctagtgggattcttgaattttaaaatgagcaaagttattgatattatgtttctgtaactagattctcttaccatctcactttccaattctgatataatgaccagtatagaaaaaacactcataaaatttgcttctgtatcttggacatataagaaatgtagggtcaaaaagtcttaagagtcaatatttaagagctattatacatttcccttaaataagaagtaatggcttctgagtaaatgtttttacagaacatctatttttttcttatggtttactgatacaataagtttggtctaaaagggagcaataggttgatcataggttaattatataatttacattacccaaaagcaaaaattccagaagatattacataccaatttatatatgggaagccaaaaatattgttcagatttatgccttcttgattgttagtgtaagtcaccgataaatatctgtgtcatctgaaattgattttcaaaacaatcttgctattatttattaaagtcatgggtcaacccaagtcaaaacattagtagaaaaagcgttcttatttatgttaatgactacaaaaatcattgaatatcttttaaagttttcaaaatgtctcctaaaatagacctatttaagcaattcatttttaattgagaattttacacaattatagaggtacacttatgacaaatttagctctgctaaatatgataataatttatttaattttctattaaaggggaaaataatccatatctcacagggttttataaggataaattgagtagtatatggggacacacttaaatgttgctgatatggtttggctgtgtcccaacccaaatctcacactgaattgtgataatccccatgtgtcaaaggtggagataatagaatcatgggggcagtttcccccatactcttcttgtggtagagaataagtctcactagagttgattgttttataaagggcagttcccctgcacatgcgctcttgcctgccaccatgtgagacatgcctttgctcctcctttgctttctgccatgattgtgaggcctccccagccatgttgaactgtgagtccattaaatctctttactttataaattactcagtcctaggtgtgtctttataagcaccataagagcaaactaatacagtaaattggtgcccacagagtgggatgctgctgtaaagacagccaaaaatgtggaagtgactttggaactgagtaacaggcagaggttggaacagtttggagggctcagaagaaaacaagaaaatgtgagaaagtttgcaacttcctagagacttgttgaatgactttacccaaaatgctgataatgatatggacaatgaaatccaggctgatgtgatctcagatggagacgaggaacttgtttggagctggattaaagatgactcttgctatgttttagcaaaaagactggcagcattttgcccctgacctagaaatttgtggaactttgaacttgagagagctgatttagggtatcagacagaagaaatttctaagcagcaaagcattcaagatgtgacttgggtgctgttaaaagcactcagtttaaaaaaaaaaaaaacagcataaaagttcagaaaatttgtagtctggtgatgcaatagaaaagaaaaactcattttctaaggagaaattcaagctggctgcagaaatttgcataagtaacaaggagccaatttccccccatttacagtggggaaaatgtctccacagcatgtcagagacctttgcagcagcccctcccatcacaggcctggaggcttaggagggaaaatgattttgtgggccgggcccagcacctccctggtgtgtgcagcctagggactttgtgccctgcatcccagccactctaaccatggctaaaagggtccaaggtacagatcaggccatggcttcagaagatgcaagccccaagccttggtggcttccatgtgttgttgagcccaccagtacagagaagtcaggaattgaggttcaggaacctttgcctagatttcagaggatgtatgaaaatgcctggatgtccaggctgaagtttgctgcaggggagaagccctcatgcaaaacctctgctagggaagtttggaagggaaatgtgggattgaagccccaacacagagtctccactggggcattgcctagtggagctgtaaggaaagggccactgtcctctagactgaagaatggtaggtccaccgacagcttgcaccgtgctcctggaaaagttgcagacactcaatgccagctcatgaaagcagctgggaagcaggatgtaccctgcaaagccacaggggcagagctgcccaagaccctgggaacctacctcttgcatcagcgtgaccttaatgtgagacacagagtcaaagtagatcattttggagctttaagatttgactgccctgttggattttggacttgcatagggtctgtagcccctttgttttggccaatttctcccattttaaattggtgtatttacctaatgcctgtacccccattgtatctaggaagtaactgacttgcttttgattttacaggctcataggtggaagggacttgccttatctcagatgagacattggactatggacttttgagttaatgctgaaatgagttaagactttgggggtctgtcgggaaggcatggttggttttgaaatgtgaagatatcagatttggaaggggccaaggacaaaatgatatggtttggctatgtctccacccaaatttcaccttggattgtaataaaacccaggtggagataattgaatcatgggggtggttttcccatactgttctcatggtagtaaataagtctcatgagagatgatggttttataaagggcagttcccctgcacacagactcttgcctccaccatgtaagatgtgcgtttgctcctcatttgcctcctgccgtgattgtgaggcctctccaaccatgtggaactgtgagtccattaaacctctttcctttataaattactcagtcctgggtatgtctttattagcagcatgaaaacaaactcatatagttgcctaggacacagttcatacccaaagaaaaacttaaaaaatattttccttgttacttttctatggtaggcagaataatggctcctacagagatccatgttctaatttccaaaacctgtcatggcaaaaagggactttacagatgtgattaaatcaaggactttgagatagggagataatctggattatccagggggatccgatgtagttgcaagggtccttattaagaggaaggaaggagggtcagagtcagaaaaattctgcgtaatgacaaagaggagagaagcagagtcagagagagaagatactacgtgagttacttagaagatggaggaagaggttatgagcccaaagatgcaggtggcttctagaaaaggcaaacaaatagcatcccttctatatcctttctgtttacaccttgattttagccccttaagactcagttttggatttctgaccaccagaactgtaagataaaatcctttgttgctttaaaccaccagatttgtggtgacatgagcagtagaaaactgacctacacctccctgttcatgttctagaacttctagggtaattcctcaagttttacctttaggtatcttctctgcctgtgagaccattaccaatggaaaaggatcttcccattgctttttaggtcagagaaagagagagagggagagagagagagagaaggaagagcaagaaaaagaggaagcaagccaggtagagcggtgaatgctgtaatgcaaaggtaacataaatgtgagacatttttcagggggcggggcatgggggaaggcatactggagaagctttagtgctgctagttagaaagatgaattttggtacaaatagcgactccagtgttaagggtaatcaagtcttaagttgtataaataatatccaacatttctttaataaaaacaagggaaataaaatacctgtgttcttatccttctgggaaaaatgatgatagaaagaaccattcagtcatttccaagatgtcacaggcattcttctagtaaggaggtagaggccatgctgttgttttccagaggggtgctaccagtgttgaatgccactgaattcttaagttgcacttttaatctttcaatatattttttgttctgggagcaataatcccattgagactcagggcagggagttaaggtacatttaggaaatgctgataaaaataaagtaagcccttcaaaagatcagtgagaaacccaggctcaaggtcttgttgtttcaccagcctcagtacaggacaattagccctgtatccactctacaggaggccaaccgttagatgcccctttgccgtgcagagcctagacttgcatagaattagaatgggtcccagcctccatacctccttccatttctcaagaaaatatcatgtattttccatctccttgctaaatgatttcatgtagggcttgattttgatttctcttaagaagttaattatctaggaaaaaaggtcatagctcattgcagctttgaactcctggactcaagtgatcctcttgcctcagtgtctcaagcagctgggactacaggtgtgcattaccatgcccagctaatttttatattttttgtagagacatggtctctctgtgttgcccaggctgggtacccttttctgaaaagcagccttcatatagaaattagaaaacctgggccctgtgtagggacacaaataacagaatagaaacacgtttgaagaccctagaaaaaggaagctggagtaacagaagctaaaacctttcttctttgtatgcatcttaaaatagaagtatattgataaaaatgaaggtattataggagattttgtttttagagccaaaagctaagccaactcctttttctgtttttacttctctgctgaatcgctgtcctgtcctccaaagaggaccctgcccttaccattgcacttttgccttgctcttttagcctccaagatataatcaccagagttatagtagatgttctttattcctcttaagagatgcatttttgcacctgaactctgtagctgaacttctttctctggtctgtctgattctcaggactgactttttatttatttttttaatactttggaaaacttttgctatatttggctatatacatttaaagaaaatgaaagacatctcattttcattgtttggtctctaaatctaccactgctgtcctgtatcagttagctattgctgtgtaacaagccaaccaaatttcagtggattatagacccaaaagtatcctttattgcttatgagtctccaggttagctgagcagttctggtcacagctgggcccaggcacatagcttcagttagctgtgggtgtggcaaacgtggctctgatgaccttggctggtccttctcacgttctccagaatcaactggctgcaaacaagtctaggatggcctcagctgtgataactgggatctcttcatatggtgtctcactcctgcaggctagcctggatttgttcacaggacagtgatggagttctgagagagcatggaaacccacacagccactgacgtccgccttagattcagcacatggttactttcactgcattctattgaccaaaataagtccaaaggtcaacttaaggcagagaaacagactccatctcttaaagggaggaactgcaaatggagggagagagaaagtacaaggaatatttttttaaatcaacgaacatatttctctgtgtggaaaagctagagcatgccctactattgctttaacaaagaaaaccatcctaaactggcttttggttttgaatactgtgtttggttcaatggttttaacaaaacagatgtcaatctttgaaaacatagtctaccacttaattctttctgcttagatcttcccacaaatatggaacatctgcccttgaatagacaaaataataaagaaaagtggtatgtggagtctgagacttcagttcatcagaatatacctttgcttctgcaatgccttttaattacaatagattgaaaaacaacaaaaaccttacaaacaaaacctctaattcttcttcaaattagtaaagaaatatactccttgcttggtttcaacaacaagctttctactaacattacttgttttcacacttcttacatctatagtctattctggatgggagagttttattatctcatgtatacatttaattaagtagctttaattaataaggcaagaaagttttgcctgaagaaccctggatgatttttttctgtcagggccaagaaaagttgattagcacctagaatatccattctctggaactcaacaatgtcttcaggttttagactgaaactgacattgctccttttgaataagggtgaattttcttctcagagacctcaggtgtgtacttttcattggctatttgagtgtcttctcctaataaagacatcttactggtctgttggtcactggttttcctccctagcctctataggctttctgtagcttgcagtgtaatttttcacatgaacaatttctaaagagcaaacaattctgcataatgcttgtacattcatttctccagaaacttgctatttatctttcaggagaaaatctacttctttcaatgtgtggtcccatataggttgcagagcaaaaaaaaaattgtatgtgaaaatgagatgaaaatctcacctaagtgatatatttgtgtgtgtgtgtgtgtgtgtatagttcagaaagctacacttttttctctctgccttccatattttctttaaatacttttagttactaaagtcatattttcaaatatttatgaaaaaaaatgctggacaagccttaatttaattacaattcgttgtttttttttatggcgtctcactctgttgcccaggctggagtgcagtcgtgcgatctcagctcactgcaacctctgccacccgggtgcaagtaattctccagtctcagcctcccaagtagctgggattacaggcacctgccaccgcacccagctaatttttgtgttttaatagagatgagggttcgccatcttggccaggctggtctcgaactcctgaccttgtgatccacctgcctcagcctcccaatacaatgcattcttattaatagcttgtaaagggccactggcacctctaggcttttcgttagtgtcaattaattatgaatacgcttgacagaaagattcagttatccaatggggatatttttgataaaggcttttaatcatacagaagctcacttctgaatgtgccgtaagtggtaaaggggctcttctcttaaaaggcagtaatcctttactgtggaggctcacaataaaaacacagctacgatatatgtcagggctcctcctgcttctcagactcattgtccagaactttaatttttcaagaggtaaagcactgaagttattccatccagaggcacacacattcttcaatttagtctctatcttgaatccctgcttgattttctgtcctggagaagcaagtctgaacaatctccatttccctttgttgagctgctacctagcaatattcatgtagcattgtttgtgcttggcctgactgactgtcctagtattaagtatctttgtcattattattgttaaatatttttgagctcttcgtacatgctgggaaggctttgcattagggtgagatgttgagaaaccagtcccaggtggagagcaaccagtctatcatatctgcctatttctgccaaatgcttctttccattgctttgggaaagagctgtttgttactatggttatttttattatattggcaggagatataaaagcttagctgtctgcagttctgcatgtgatactgggatatataggagaacaactctttggggtacagcttttcttccaattccgttcatcctctctatgaccagacctttccagggtgctgccgggcaggaaagctgcctcggttgcaattccatctcaggaattctgggcagccaactttctacattttgctttgccaacattattccacctgctttctttcagaccattttgtttaactatctccctctgctgatgccttcaccaatcccccaacacacactttctttgcagttgtggatttacttgttgttttcttatttttctgaaattttaagtgagtctcaaaagagggagggtagggtcacccaatttactagataaatacaggacacccagttacattttaatttcggatatacaacaatattttgtaagtgtgagtatgtcccatgaagtatttggggtacgctgatattgaaaaaaattaaaataaaaatcttattgtttatctgacagtcctaagaggtgaatctcacctactggcacattcaggcttctgtcgttaagttgaaccttcttctagatttatgatgcttccttacattttgtagcagtcccaaacaccaagaatatatgagagtaggttcaaggtaatttcaactttctcataatcttcatttcgttggtagcttttcagttatattctttatcaccttgttagagtaaaatataacatgtggttattctaaatgacctttcttcagcctttttctgagactgtaataacctcaaggctaaaatccaagagctcatagaactgtatttattaacgtttatacagaacccattttgaagttcaggctcagtagaaacaatcctttcagagttgagataatttttccagagggataaaacatggacatcatttctttttcacttatcttaactactctgtatcattttcattgtagctcatgatgacttcttcactagagcaagcggaaagagagcgcagttatatatgcagatggcctggctttattgtcatgaaatagaatggattttgttgaaaactagtcatgttatttaattactaacaagaaaaaataaaatacaaccaaatattctaaataaagcttcatcattttgggtgccccatattacttatccaacttgcatccccaactgtcttaaacaatgaaagatttcccctatctttgaattaattttttaaacattttaattcggaaggacaccttaaatttacattacctactgtttgacaggctctggttgttaatgagtttcgcttttgtttggtttttgtttgtttttttgttgttgctactgtttttaataatgtaaggtcatcatcatttgtgtacatttgaggtaaaaggccagactcaactctggaggtggagatttcacaagggaccaaatggaggactagcttacacagggccaaggctaaagcagctttccatggacacacccaccagggtgccatgtcagtttaccattgccatggcaacacttggacgttactgtctctttccatggcaacaacctgacaatccagaagttaccaccctttccctagaaatttctgcataaaccacccattaatttgcatataaataaaagtgagtataaacaggactgctgaagtgcctctgagctgcttttctgggcacactgcctgtagggtagtcctggtcttaaggagcagtacgtctgctgctgtacactgctgcttcaatacaaattgctgtttaacccacctgtttaacaccaccagcttaccgttgaattctttcctgggcaaagccaagaaccctccctctctaagccccagtttgggggcttgcctgtcctgcatcacagtgacttttctggagttaagtggttgccacgggtgctatagtgatgagaattgaggtcttgattggtcactggtttgcttgttaaagtggagctggaattagttctgggtgatgactttgactctgttttcaggttcctgggattcctgcttgtaggagcagggtgacttctgcttaagtatctgtttgcatcacattcctcaccactcaggaaaggtcagtatgggagagctgcatttttggttcttatatgagaataggatctaaaacttgtcatcagtgttttgccaaagctgaagcaagagaaacactgtggatggacaaataccaggcagatgtgtctattcctttatgctttaaaactcaacctgttgtgtaagccagaacagaaaggaactcagaactcatctgggccattttatgttatccacctgaaattgctatccccatctccatgacacgtttttctcatgcaaataacttccaaagaaacagagttatgcaaatcatgtctttctttaccacctcaaaaaaatcatgtcttttgaggatgcggcatactccattagcagttgtcttctgttcataaggacccagaaaattttctccaatcctaataccaagaataaatatgtttcttcttggaagtctattttttttttctatcttctgaacactgtgaattgtacaacatggttacatctcttcagtgattgcaggaaagctcagaacaaagtgtgtagattttgagccaaatttggctcagagctaaaatcatatttagcattaggtatggaactcaaagcaccatttgtgtgtgtgtatgtgtgtgcactaatctcatctctggctatactttttctctattttattctaatctcacctattttaatgccttttattttctacatatcaagattaaagacatatatagaaacatttttaaaatatgaacaatcaataaaaaatttaaattaaaaatgttaaaatatcaacaaaaaattcaattgtgcatctctcttgccttacatacgtgtgtgcctgtgtatatgcacatatacatataaattaaattttcttgtatgtatttttataaagtattttttcaaacttaaaaatcaatcactttttttcacataggactacatggcattccattttataagtgtgttataatttatttaaagagccttttacgttgtcagacattggagtgttttccagatttctgctgttataaacaactgtgtcacactctctttataacaactatttgtgcactttattcatgaatatatttcaataattcttaagcatggctgtgcatcagaattattctgcctaataatctctttaaatcctttgagaccaaatttaaattttaccttttctagaaataatttctaaggaagcctgtcatctgtcctacagagaattattatactctctaatattccccatagactttttatatatttttgagggacgttaaactatttttaatgtatctacttcaataaccaagtattgtattaaaagtggcttttaaccaagaatgtgcatcagaatgctatatttgtgaaatacactgtgagttctgcttcccctaaggatgcagaaaacctcaagagaatggagctcctgatctgacataagaaaaagctgggtaacttacaaaataatacctattttatttttaggttaccagattagtgaggtccatcccatggcaacaaaatgaatgaaattccaaagagtggcaccatttggaggaaatatgggcacatgacctgcttcaccttttcaagggcacaataggaagaggggacctctatagaaaccagtaagaagcaatcagctaaaattttaagaaattcctaaaggccaagtgtgggctagagtttccctttggtgtagctgggagcggcaggcgcaaggggagttagtatctatttgcaagctcttatcaagggcttctgcccagtgctcaagattggggtaaggcagaagagacctcccttggtagcacaggaataccaggaggcgattggctgccactggaggagaaaggaaacactgcttcctcctctagacccttctctcataggaaaagacatgaaacactcctgttcccatggccgaaggtatgatctacgcttttgtgcaagaaggggaagtaaaaactgctagaaggcaggaaaccctcataggaccgagatcctacaaggaatacaaagcagaattttgctacctctgaggaccggacagaaaagtttctctttccccaaatctaccatagatatcagaaagaatttggctgccatggagaggaggagcaagaacaattttttaaaaacatacatccaagacccgggtgcacaacgtggaccaggagaatcaagaattactgtttccactgtaaggctagctccagatcacaatatgtggtctatcactgaggaaaggggcaagagcatggagagagactctgtgttctgcaagcatgcaggaacttctgaaagctcagggagaaaaggaaccctgagaaaaactctccagcacactgggtcctaatttaagcagacagcggcccactgcaagaggactatgaagtctgtgatgcactgaaggcaatgatggcaatgagaaatcgaaacccctctcactcctgaatagacggactcaaactcccctccccatccatcctcacccccacacacatgcatgcatgcatacatgcacatacacgcacaggcataaacctcaacttgactgaaagacatacactcatgccttttcctgggcataaatactatttgcctcagtctctactgatacactacacataaaatttggtactggataaaagattagaacacacacacacagataaaaaaaatcagactcggagatattggaactctcagatgataattttaataattgatatgctaagggatctagtagaaaaagtagacaaaatgcacagaccctggagaatttcagcacagagataacagtcacatgaaaatgctagaaacaaaatacatgatatccaagatgaatctctttgatgggttattgcgccaattggatagcactgaggggggagtaagtaaatctgaaggtaggtcaatagaaattaaccaaactgaaacacacaataagaaaaagaaaaacaaacagaaagagaagacagggatattagaatattagattccaaaaatattaaagaaataaaggctaaaattattccaaaattaaacaaagacaacaaaccacaaatccatgaattttaaagcaaattgatcaggatgaatactaaacaaatcaaacttaaatacttcactcccaagcttctggaaaccaaagataaagagtcaatcttgaagtcatcagagtaaaagaaacattacataaagggaaacggtgatactaattaattcagatttctttttgtaaacaatgtgtatttgtttcctagggctgccttaacaaattcctgcacactgtgtcacttaaaataagagaaatttgttttcttatggttctggagactaaaattctgaaatcaaggtgtcagctgggccatgcctgcttcctgggaaggctgtagagaagaacccttctttgctgccctcagcttcaagtggttgctgcaatccttggcttatagctgcatcactccagtttctgccactggcttcacatggcttcttccctctgtgtgtgcttgtgtttctccaaatctccctctctttataaagacactggtaattggattaccactcaccctgatcaggtatgaccacattttaactggcttacatctgcaaaggttaagtgctaggtttaggacttctgcatatctatttggggacacagttcaacccacaatagatgtccaagaagatgtgaattaaatgagtttgtaatcgacatttagatattgggggaattaatttgttaaatccttaaattttctttaattggttatgtaagtatgatgtgactatctaacagaatgtagttggtttcatgtagaaaaataatttccttgtttaatacaagatatgtaaatattcattacaccaaataaaaccaaatgaaatgtatgctagacatttatgaataaatcaatgaaagaaggagagactattggaaaaaaaatcatccattgttgtaattttgaatacaaatgttggaagccaatcaatgccaacctttagaacacttatattccatttttgtcttattatcatttcattgaatcatatttggaactttaaatgttcagtttggatgattattctggttttttttttttttctttttgatgtgctgtttgaaaagcgtgtgtgtgtgtgtgtgtgtgtgtgcaagcgcacctctgttagttgtgtgagaaatgactttcaggttgaactgtaggtatataaagcatgcactggtgaatcgattcttgtttctgggcttatgagtagctagtgtgacatttgaaaaatgaccttaatgagagtttttcttttctatgccctatcgttgtatgtgacaccacagcccaaggtgacggtgtcttcacttcaatgccatcttttgtcccagaggctatttttgctttagttaccccaactgacattggaatagacctggtgatgttttattcatgaaagcagatcttgtgaatatagctcccaatacaccagagagacaaaaatatcactacgattgcacctaaactaatctgtagttatgtaacaaattgacacataaattaaattttcactgctaatgcctgcttaactctgtaattatactttagtttggaattctactgaagtaattaggttagctgagatttgctcatcaaagatcactgaaagctagaaagtatatggacctctgttcttaagccacatgcttcctgctcaggggagattttaaagctatgtccataactctatgcctattcttttacattttactgaatttgatcagctgctggatactgttttttttttttttttcttgagaatgtatttatcccgttgtggacatgttcctgtctccaattcccccgcacttttcctttgctctttattgaggagtcatccttgtgctgaagaactttctgttttttatatgattgatctttaggtggtaggggagccctcactgaaatgtggtttaaaaaaaaatcacactctttcatcttcggtttcatcttctggaagaaagaagaattgagctattttaccaactgttgtgaactattcaaatttcctctggggagaaaaaccagttgctttcaaagctctgaggagtatcaaaaaaaatgctcctaggctaaatacagtaaataaaaggcaatgtggactttcaaaagactgcttcgggggcctacaagaaagttttagctggtgtgagaatcactgaaaccgaaacctgtgggaaaaaacccaaaaaaacaaaaccagatgaaatcagaaagagtatctataaatttagcctaagtgcagggatacctacattcattgtcctgatgaaataaaacactgaaagaaaatatgggtaatctcttccagagtttgtgaccttgcaagttaaaaataggatttactgatttatgcattagatttattaatatggacttgttcttaacatttgctctttaatcggtctttataggtcattattttttacaacaggctcctaccttatcttctggattctggattcaccactttgaatctattttgtgagcatgcgctctctctctctcgctctctgtctctctctctctcacacacacacacacacacaatgaaaaagtaactgaagacattgtttaagcctggcaggggacttcaatcatcaccttctaagtgttgtcctcgtgtagactttttcctcattggatcgggtttgttctgtgtaaccaacagtgtgtaacaaaagtgatggtgtgctcaagagattagatattaaaagactgttctttccttcctgggtgtactcttgttccctccctccctccccacctccatctttctctctctctctcactgcttcctctgggggaagtcagctactacctagtgaagacactcaggtagcctcctgtcaagtcacagagatctcttaacaaccatctgagagagcttggaagcagaccattgaaccccagacaagctttgcgatgagacggcaaccccagcttccggcttggctacagcctaagacaccctgagccagaaccatccagctaagcccctcgcagattccccacccacgaaaatgctgagatgacacataagtattgctttaagcagctcagtttgggataatttataatatatcactaacatggatttcttaaaaaaaatatctaaaaacctattttcaacttccttaacattaaaattctctgcctactctcatgctcgttcacatttttgtcttacccagtctgtctagtctgctttattattcaccccagatgagttctatatacttgcctagccagaatacttttttttcatctgcttatgccttcatctccattaattttattcatattcttcgttctgggcaaaaatacctattcctttcattttaccgtactacttaaataatgtctattcattaaatcaacatacttcttgaattcttccaggagtaacccggagcactctaaccactttgttgtctcactccatagcagttaaaaattacagtatatagttagcctttcagaccgtattttatactggtccttaaacattcctcagaggcaattctataatacttgtcggctgactgcatgcttaacttaatcaggataaggaaagagcaattctagtttccattaaaattgaagtacatatataggaatatatatatgcatacatacatacatacacatatacatacatatatacatatgataatagtctttatcataaaatgttttcactgtagtttgcaataaataattatgagcttctacaccacataatacaatccttcaattcaggaatttttatactcaatcttgtatttcctcagtctaacacagtgtctgtcatagacaagttattcaatagtcttactgaactggagagatttgatttttattgtcatttcttttcctgtctgtgcattagtgaaggttgataatcatgtcgaatgacagaaggaaatgaagtacattaggagtgcacttaatctacaaattggatcatcaatacctacagaatggagagtaaaatatgctctatattaatatacctgccattggtttcccaaggacaattgattcatttcacacataccctggcggtatgtgaggcaatcctatgcctaccctttgacaaataaagaatatcaggtgttaagttgtataataatattcacaaaacatccattgccaatacctgaaaaaatcaaaataaaactcattcttccaggtgcgttacttctttcctgtgtttctgcttctactagaaacatgattggcaatattcttttagttgcttttaaaattcttacgatgatattcaaggcctttcaggtatggattcttacctaccattccaggtttagctctctagtgacactagaccactttagatttcattacgtgccttactgataggatggccagcattagcaaacaaattctggcaatttgaaaacccagttaaatttgaattttaaataaacccaggaaaacaaaaaatgataatgcattgacagtgatgatcttggaacaaataaaagctttccattttttatattttcatggaacaggtatattttggagaacttagaagtaagagaatattattgtcttctgagaatcaacaagtaaatcaacacaaagtaggaaaatttggttgactgtgaaatatcaacaataaatattgaatgcaggacctgataaagagttttctataatactgtaataatgtaatctgtactaactcggtagaatatttgattagctggaaagctcctcactggttcactgtgacatagcagctttcacctttatttgttgctcatcaggagttagttgcacttttatctaccaacctatttattatactaatataatttagctgaacgtcgtacaaaccaatgaaacttgagaatgagagttgttatttctatgaaaactaaagtgaatgtttcaaaactcttcataaaggcaagttgcaaagaaacactgttgaattggatgtgggattcaaaacaaaaactgtaaaaaattgagaaaacaacagcatcaacataaaatttctcaatcattttatatgcaggttgctttaaatgtgtatgagttttcgattcactttaaaaaagccaaagttagaaataattgtgtgaatgaatgaatctttccaggtttggagtttaaaaaatgtttacagtaaatatatattattttatgctaccattttaattcaatattttaaatcagtgacaaactactggtccctttccatcaagtaagatatacaaaagttaaaatatttattgatatgttaaatatattcaagaatattaatgttgcctaaagaaaaaataatatgaacagaagatcctcaatgtacatggcagaagaaattttaatttaatattcttttattattttcattggcaagtttatccttccatgaaaatcagtccttaaacttttccatgcttaggtaagaacttttgattaagtcatctgaattcactttcctttggttatttttgtaaagcagttgtttattttgatttttatttgaattgctacctaacctatttaccaagatagactgtagctaagcagatgatgtagatttttgtccttggctctgataactctttgaaatatattagcccacaataatcaaaacagcatggttctggtaccagaacagacatatagaccaatggaacagaacagaggcctcagaaacagcaccacacatttacaaccatctgatctttgacaaacctgacacaaacaagcaatggggaaaagaatccctatttaataaacagtgttgggaaaactggctagccatatgcagaaaactgaaactggaccccttccttacatcttatacaaaaatcaactcaagatggattaaagacttaaacataagacctaaaaccataaaaatcctagaagaaaacctgggcaataccattcagtacctaggcatgggcaaaggcttcatgtctaaaacaccaaaatcaatggcaacaaaagccaaaattgacaaatggtatctaactaaactaaagagcttctgcacagcaaaaaacactatcatcagagtgaacaggcaacctacagaatgggagaaaatttttgcaatctacccatctgacaaagggctaatatccagaatctacaaagaacttaaacaaatttacaagaaaaaaacaaccccatcaaaaagtgggcaaaggatatgaacagacacttctcaaaagaagacatttatgcagccaacaaacatatgaaaaaatgctcatcatcactggtcattagagaaatgtaaattaaaaccacaatgcaataccatctcacgccacttagaatggtgatcattaaaaagtcaggaaacaacagacgctggagaggatgtggagaaataggaatgcttttactctgttggtgggagtgtaaattaattcaaccattgtggaagacagtgtggtgattcctcaaggatctagaactagaaataccatttgacccagcgatcccattactgggcatatacccaaatgattataaatcattctactataaaaacacatgcacacatatgtttattgtggcactgttcacaatagcaaagacttggaaccaacccaaatgttcatcaatgatagactagataaagaaaatgtggcacatatacaccatggaatactatgcagggacatgaatgaagctcaaatcatcactctcagcaaactatcacaagaacagaagaccaaactccacatgttctcacttaaagtgggaggtgaacaatcagaacacatggacacagggaggggaacatcacacactggggcttgtcaggaggtggggggctaggggagggatagaattagaagaaatacctaatgtaggtgacaggttgataggtgcagcaaatcaccatggcatgtgtatacctatgtaacaaaactgcacgttctgcacatgtacctcagaacttaaagtataataaaaaaagaaatatattagcccttgatcccttcacagaaggaaaacagttcctccaacttctcaacctatcttaaatatttgtttcccaaccaattcagtgcctttatataaataatacaaacacaatttctgttaaacttacgtagcttgctgactttgatagtgacacttatagtacctttcaatgtataagtattcatatacacattttatttctcctactgttttataaagggcttcagggcagagatttacgccttctagtttgttttatgcctcataaacccagagaagtatctgggacatagaaagttgtatgttgaatgtatttgagttaaactgaactaatgaacttcatgatgtccaaaatctagtacctcaggcaggaggtgttgccctattcttcagcataaacagacagttacagtttgcctactaaagggaaaccttagggaaaagacatttatttctccttggcatgctgtaaaaatctaaccatctggccccatatctcccccaacatgctgtcctattaaaatgaaatatttttcccttcgggtccatgaaccagaaaagcagcatccttaattgtaagacagggacgactacccattagccatcttggccctgacattccctttttctctacagaagattgtgtaagatttgaagatagaacttaaagcaaatgcaagaggtagaaagactaggctctgccaattagttattttagtttctattggggaaataacttgttggtaaggatttacttaaactgggcataaaattataattgttcttaataaaaagaggcatatattaatattagaatatgggtatattcaaagaactttgcagctacaccagtaaactcaggtacaaagccttcctgtgttctctactcttctgctctgtcatctgatggtatgaagcatgccacaatgagaaaattaccctaacctttacctggctttcttctgggaacactatttcagacagcttcccttcagttcaagagcttaaatctacctttatatcctctctcaaatttaatttaatgtcttcttaattcttgtctctctttttctcacttttccttttgttttacctattttctacctctaatttcatccctgtttttaaattctaaagaatatccttttgtggaaatagtaaatctttttgtttcttttgggctcaactattgatttaatttattttaagtattctggcctactgctttatttttctctatagccaaactaagtatctcagatttattttttcttctttataaaaatgtttatgccttttacactcattatcttctatttcaattatgggtaaaatttgaataaactctcctctccatatgacagttaataaaagttaatgttgattttatttgttatttcttgaatctaaagttcccaacaaaaataagatttgatttgtacatatgaacaacttgctctctgatagggtagcacatagaattttaagatcctttaattctatatttctgtaaatgtttctctaaatatagcatgtatctgatttctatggaaaaatatgttaatgtgcatatttctgagtcccaaaacaaaggattctgattcaataggtaggtctcaggtggagcctagaagctgatgttctttaatcaatatcttgggtcattttgatgaatatatgccatgacaaagactaatcatgtattacgacaaaattgttagatgaaaactcacatgctttcaatgagtattaatcacagtattctgtgagattatctattttatataacattttcagagagccctggaaatatggggcgagaatatgaaaaagagaagtccaagtcagagcaatcaggaaagggaaagaaataaaaggcatccaaataggaaaaagtgctcaacatcactaatcatcagagaaatgcaaattaaaaccaccatgagattctgttgcacaccaggcagaatggctatgataaaaaagacaaaaaacaacagatgctggcgaggctgtggagaaaaggaatgcttatgcactgtttttggagatgtaaattagttcagctactctggaaagcagtttggagatttcttaaatcacttaaaacagagctgtcattcaacccaacaatcccatcactgggtgtatataccccccaaaaaatagatctttagaccaaaaagacaccacatgcacttgttggttcattgtcatgttatttgcaatagcaaaagacatgaaaccaacctaggtgctcatcaatggtagattggatgaagacaatgtggtacatatacaccatggaatactgtgcagccataaaaagaatgaaatcatgtcctttgcagcaacatggatagagctggaggccataatcttaagcgaattaacaaaagaacagaaaaccaaatactgcattttctcacttataggtgagaaccaacattgagcacacatggacacaaacgtgggaacaatagacactgcagtctacaagagaaaagatagagggaggggtgtgtgtgttgaaaactatggggtactatgctcactacctgggtgcaatatatgtatgtaacaaacttgcacatataccgtccgtatctaaaataaaggttgaaaatttttaaaatattatgaaaaaggcaaatttattcatacaactatttgatgaacattattgagtgtctgtaatattctaggccttggggatattgtaattttaaaaaggcaaaaacccctgccctcatggaagtttagtaaagcaatagactatgaacaaggtaaattactgacatatataacatattagctagataaaaattcgaaagagatttaaaaaaacagggagaacaaatcaagtggcagggattgaaattttaggttgggaggctaaggaagggttccttggggtagtgactttagcattaacattgaaaaaagtgagcttatctcctacaatacagggatcatattccaaatacatggtaaaaaatacaacctgggtaagcacagacctatctgatgaatcaaaatagaggctgttttcacctcatcctcaattcaccatcatcctttctctgaccttctcccacctcctctaaagctaggtaccctcattttgtcaggtttctttggccacaaggaaaagattccaatgaagttgtcatcacataattcacagaatgaaacggaagccacatctacagagcaaggctcagaaacagaccaagaaccagagcattggggaccatttgactctcttgtcaaagccctgcctcttgtagaaataaactgaatcattatttcccagtttgtatggcattcatcttcatatccacagtctacagagagacaatctgtctgtgcacatggcccttccttggctgtactgtcacacaacaaggaagcactaggcaggaggaacagcttaagcttttgtagaggcagtacctctagaaatagaaacccatccagagcgtacacaacgcaggcagctaatgttcactacggtcatgattcctcccagctctgcagactccacatcaatatctactagcatctggtttaatttccttagaccaatttttttttctattagtatgttttataaacttttctgtcgtaatgaactggcaaatgtaatgagttttacatcaaatacctactcttacaatgaatcccactgactgacttaggttgggaaacacatttttcttttcaggatttctttagctgtgtagctgggctggaaggctgcggttggctgaaggccgactcctgtgattgacggaaaggaaacagccattgaaagaggaggagcaagaaaattggcactagttgcctacttaaagctaaaaattagaaaaataaattaataagaactttcaaaatgtgtacatgatctttttttattgactagaaaacttcattttttgaaactttgtgcagtttgtttttcgtaacagttttctgatctcagtgacctcttctttctctgcagtcgactttgtggaaagcctgatccggttcccacaggagcttatgcagcagtggcatttgcagtaggtggtgacggtatttctaaaaatttctgtctgtgctggaaaataagacatcggcactgacatttccaatttgagaacaattgtgcttcattaattctgtattataaatgccactcctggatttggttttctttgatttttttctgatccattcatttcaataatactcttttctatagaactatctcatctttatttttggttgtttatgctggtatctttccacagacccttttttgtgattgtatattatttaacttatctgtagaaagtagtgattgtatattatttaacttatctgtagaaagtagtgattgtatattatttaacttatctgtagaaagtatgagttgtggtattatacattgtctctgcttcggggtcacgggcatgtgttttaggtttaaaaatgctaatttttaatgcatttattcatagtattagaatataaaggtggtaaatctaggctgaaatataactattcttgggaaatgtatacatatttcaatttactgatgttgcaatcaaataagtagtctttttattcaaacaaatgattagatagaaatactaaaatacaaaatatatatttataaattgattaattttgcctccctacctgaacactgagtctttctatttgaaattgatgcccataacctctgagggggatggcagatgttgggaattcttgaagtaccaatgtgttgactttggagattctggaggaaattttctgtccctaatcatttttgtccttattctctccagtagctgagacctgtgagattctgactctcatccctagcagtgtggaccgcaaaatcactctctagcgatttgttagacgccaaatatctgagcctcactcagaatgttgtgaatcataatatctgggtcttagtttatacattaaaaaaatctcagatgaatcttgtgttcactaaagtgttgaaactatttaaaaatagtcatctttccccataatgatagtattcaaatgccaaattcaggtattttctccctgtctctgaaacctatcatgaaagtaatcttaaaaacagccaacatattgagtagttgattcaacatcaagtcagtcttgttattcccttcttgtcctttggtgtctccagacagtatccattatgccttataacctgcctagtaaccttgtctctggaaagcttggactcaaccatgcaattcctgagactgcattcctccttatggcctagctcctagatatctttctgtttttaattcttcacctacgctcaggttaactttgttggaacaagatacttcaagatttggccagagtgccatatattataggaagcactcttcaatctcaggctgagcaatttgctccttctctgagggcccacctattcattccaccgaatcaactttgttcacatttgattgcattgccagttgatttttagggtagactttctcactggacaatgaatggccctagtgctgggatctggtatgagttcttgctttcttggagcctagggactacttggcacccagtaagcacatcgcaaagacttgttacactaaaaggaattgaggcaactggtttctgtgccagagtctagttatgaagcaagatctgatctattttgccatctaattctaatctgagctctttgatcataacttaacatattgaagaataaaagagtctcaggaccatttcgttctctgactagataatatttactttaatatttcaaagaattgagagctcccattttctttagatgtaacgacagtccatgatataaaataaactaattattgttgaagtctaattttcaatttgagtgaaagaaaatgagacttaaaaaaaatctttttcaaggctctggcataacaatagtaattattttcttttcactgattaagttagagagcactgacatttttggtctacaaatgagcctcaggtgagcacaacaggtttgaaaatagtaatgtgataatggcttccaaaacaaacagacatctgagttttcttgaactcttataagttcgctattctggaaattctgcatttggcttgcctaaaatgtgatatgtaaattacaaaagacaagttgaagttaatgctgcatatttctcttctttaaaacatatctatgcttacatgtgtcatcaaaatgaggtattgcaagatagtcctataactaaacgttagcaatgaaaagaatgtaattgcaaaaccatgctaattacttctgtttttaaaactaccgaatgatttattatcttactaagtatattttaataattagatcttctaaaaatttaaatttaaatctctaatttagggcagtctatataattctggttggagtaaaactagtacaaagtttcagagaaaaatttggcaaaatgtataaaaagacaagtatacacattcttataagttcctatctattgaggtatcctaaaatgtgttccatgatgggaaaagtttttgataaacacatttattgctgatttttaattattgttccaacaagaaaaaaaaaatgaaaagttcagcagttgagtaagattaccactcagtgaagggtttgtggttagtattaaatttcttttaacgtcttttctatctttttgaaaacagttatgatgcaacatttatttctttggcaatcaaaaacacgtaaaacagctttactattttatttgaaaatataatgaattaacagtttactggaagcagtttttaatgagtggttctattaagtactaaaaatgtccataaatcaccatgttaggtgctgtgtcttgagcagttgattgatcttttagagttagcagttgtagggacagcataaaccaaatcaataaaggtttactggacattatacctaataccaagctccaggatgtattcgtaagtcagaaaaacctactcttccaagaaattacaactcttagctacctccaagttaccttttcattgcacaataagtcacacacacattttaattatatatattcaacaactcgaagaatggtggctgtcagtttcatccatacttcttatgaaagggtatgtgtgagacataatagagaaatatatgtagttatcacaacattctgtgaaagggaataattttctttttcttggcaataacaaatgggtcatattctatctatgtctctctgtctttgtctatgtttatctatctatcaatctacctatctactcataagaattcttgaaaggactctgattggtaatatgtgcaagtctttataatccagaaactatattcaaacagaatttcacatgcaatctgatatccattttctcactccctttaaagataacatcttgtaatgtatgggttaagaacattatttgttttcactgaacctattaatttgtcctctccttagtacacttcaacttgggtggttctttctctacccctgggtcacagtttcactgctacttactggtcactctagtttattcaaacattattctccagaatgatgtgcccctggaaaactatccagtaaggagaagggctgaggtgggactcctcttttccttgtaccaggttatgcagagaggcgtgtgtttatttccctactaaagaggtaagttagttataaaggagaatgctaaagtgtatttaaggtcaagaatgttctctagtgtccccttcccaccctctcatttcggatctagcatccttggctctccagttcaaactttcctcactaaaatgccatctatttcaagttcatctgtgtcaatcttcagcacctttctcccaaaattggttgccattgggaagtagctcttggcccacacaagtgatcaaaactgcaggccctggaactcaaatatttctttattttatttggctgagtctattttttaaaaaagaagaaaccaacgtttcacagtaagagaaattttagataaaaatccgagtatcttgactcttgtagaaaacccagaaactcggacaataattcaccagagtggagtaggagctgggtcctgttgatagagaagttgcttcactcatttgtttgcccgtttcctagaagcatctgggtttgagacctttgccagggactcctcctcctatccatctacattaaagttacaaccatccagtttgtactgctccctctgcattcagacctggcggtcacagtgaattttagtttatgacccaagttaaagaaaacattggaaggaaaagcaggaagaaaggaaggccagtttactcctagtgagtgaaactactaatacatacataaacacacacacacacatacacacacacaaccttctaagggctaaaattaacatacaaaagcctaagtaacaaaaaattttagcaagccccattttcgtttcttttgtttttcattttgttgcctcctgaaaaagtgaagctgctatatttccattccagccaagcctcccttaagttctgtaggtctcctcagtctcccactcaacctcagggctggagctacaagaagataatcgttcagctacttccattctttcataatacatgtaaaaatatttttaataccacacaaaataaagaatataaagtaaggataaaagaacagattcagatataaaatcctatttcttctcattatggaattggtagaaaacgttatatctaagttttcctcttgcttttttaagtgccccaccctgctctttcctgaggttgatctatgctgggatgttactaggttggtgcaaaagtaattgcagttttgccattatttttaatttaatttaatcaattatgtttaatggcaaaacagcaattacttttgcaccaacctaacagctttttatgcaaggtcctattgcataacatgtgctgtggatatgttctcaggctgtgtgtgccattgttgacacttccctttcagcatcaggactctgctattgttaaggaggtttgttttctccaacagccttgacaaaacgatggcttgctgcgttcattattcatctgggagagctccagttctgtgtcttgcaaatctgagagttcagccgtgtgtgtccagcgcttgtttttctctctgtgccctgcactgatgggaaagcaggctccgcagtctctaatgaagaagggcaatgtcctgctgggtacaatggagagagaaaaatatcacaggaactgtagctccatataaggccttcatttaacctcttcattagccacctcatgctcactatcaagtgtgttacaaaaggattgagtcttcctgactatgcttttggagtcaatttaaaaaaaaaaaaaaactgttccttgctagtataagaattacattatcttgatctaaaatattttttgaacctattcaaagaagactatgcttttaactgaacgttttgtccttctggttccccttacaaacctgagagagaattttcagaaaatgggaggttaggaaatagggctgtattgatatgaaggccaggtggtcataggcagggacttcagaggatccagtgaataagagactctgtaacagtgttaaatgcttaatcttcctgaagacattgatgtcacacgtactaaaatctatagaagtagtggtagagggcagcaaataagtttcttcattgaaaaggtggcatggaagctcactgggttacagagagtaaaacggatgccggtgtacgggagcccgagaagcaagtgttacaagctgttagcactgtaatgacccagaagctaacagcccacaaagaagaagcatgcagagatctcaatgtcttgggtgatagcaagagtcagagataaactctgaaactgtgtggtagcagcaaagactgtaatcctcttaggaagaaatctaggcacctattcaacctagagtgcaaaaacatggcagccagaagagctacatttgggaacacataaaagccctttggaaaagccatggcatgggcagtgtttgatccaggtagcgctttccgtgagtctggtagcatgaacacggcatggtgtgatacagaagaccgacgtggttttgaggcttcctttctgctatattttcaagctggtagagattagtaaaatatagcctaccataataaagtaatagcataatttagcatcgatgtaatggaaaatgtccccgttttatgttttgtggaaacaaaaggtttacattgatattaatcccttaattttattagtttggagtctccctctagatatttcagaatttaatttcttttctcagagtttccctcaattgtatttaggaaaacctcttatgttttcttcttagaagccaagaacaataaggaacgttctggaaataattgactaaagccactatgctagttcctccatgagtaagctgttcagccaggtagaatgacattcccatgattccactgagcaaagtatttctctagaggtagctacctagatgtttcaggctggcacggttctatgataaactatggttggatggagggaatgacccactgcttgactgtaacttaaaggttctcatctagactctagaaggcagcagttctaagtctgtgtgtttccattcccttgtccaacaaatcctgtagttttatccaatatctttcttcctatatgcgatcagaacaagactctcggattaaaagaaaaacaaaacaaaaagaaatcagtctgttctgccttgaaatcacctttctagtgtacctaagcctgaaacaagaagaataacaatgtcatcatcaacaaacacctgtactctccctgacaaaaacatatattaattaaagaagactaaaacaaaacaaaatacaaaagaaaaacagagaccttctccattatagcatagaaaaatcttagggtggaatagggtcttccttttcttaaattcaaatagcttctgcttaggctcactgaagctcaccttgcttacctaaagtagctcactttaactctgatttctctcatactgtttatacactgaatgtataaacttagtcttcttagtccggtttccttgattttgatttctttttttcctgcttttcttatctcactgcagcattctcctcttgtttgaagtttctcctttatcaatttctatgtattattttctgtaacatatgcacttgagaacaactttaatacttgaagtctcctgtgtgcctgtagatcaggaaaaattctaggttatgagtaatggaaaaaattcaagatttcttacagtgaaaagggaaaggctgggaaaaacaggcaaaatatgaagagttctagagtgtttatttttctcataataaagttcatgttcataaaaatgtctggattaactggcactgcttttgtgaacttgatctccaaccagcttcttattgttataaaatatactcaggattcaaagtctagagggaaagcctgagcttgcctaatcctcattcaaatgcttgctacctgacagtgccagggtgtggaaacattgggacagacttgcccccgtccccgttttttttttttttttccgttgagacggagtcttgttctgttgcccaggctggagtacactggagtacagtggcacaatcttggctcactgcaacctctgcctcccgggttcaagcgattcccctgcctcagcctcctgagtagctgggactacaggcacatgccaccacgcacagctaattttttgtatttttaatagagacagggcttcaccgtgttagacaggatggcctcaatctcctgacctcgtgatccactggcctcgaatcttcccatttgaaatggtcactaggccaggcatagtggcctatacttgtaattagggcactttggaaagcaggggctagaagatcgcttgaggtcaggagtttgagaccagctggttagtatagtgagacccccatttctacaaaattacttttttttttctttttttttttgagatgagtctccctctgttgcccatgctggagtgcagtggtgcagtcttggctcactgcagcctctgcctcccaggtttaagcgattctcctgcctcagcctcccaagtagctgggactataggtgcccaccaccacgcttggctaatttttgtatttttagtagatacggggtttcatcatattggccaggctggtcttaaacttctgaccttgtgatccaccttcctcagcctcccaaagtgctggggacacaggcgtgagccaccgtgcccagcctataaaataactattttataaaaattgctgagtaagatggcacatgtctgtagtcccagctactaggaggccgaggtgggtgcattgcttgagcccaggagtttgaggctgcagtgagctacaatcacaccaccgtactccagcctgggtgacagagcaagaccttgtctcaaaaaaaaaaaaaaaaaaaaaaagaaagaaagaaaatgaccatggccattacttccaaagtctatacataaaaaggattccttcaagaggaatattgaataataagaaagatttggtattgaatggctaaaaactggcaattactcaccaaaaatgtaattttaattgtactttattatggaaaatattatacaactatcaaatatattattaaacattttaaaaatttgattagatgttctgtctttagcatccaactaaataaagcttgcatgattattatcagactaagggaaattttagtataaacacctgtacatctttaacatttctctttttcatataaacttcataataactattttcatagttataatattttatcaaatagataagatataatttgcttataatctaccacctcagcccaggctcacggtgtcaaacacaggctaatatttatttattttgttgacatggataataatataaaaactatttttatttatatagtccttttcctacttttagattataagataatctcctacaggagaaattacagtgttaaatgtcgtaaacatgttaaaccttgatcagtattggtacattactttctaaatacattcaacatttctaagcttgttttgaataaggctgtgcaaaaataaggtagataaaatggctgaaacttcaattaagggaatagatgtactatatatggccatagagagaaagagaagctgcttgccttaagctctacagagggctcaacaagcttacacacacacacacacacacacactcccattacactataaagaaaaataatctgcatctgatatatggtatagttgtatgataatcttggcagaaatctggacttaatgctcataagtagtaacatgctagcacttcattacatattattgactttgactcatatttgctgcaaaaaaatattccaaaaccatttgcaactgaataaagcattcagtttgcatgttgggaaaactattaaaagtcgctgcatgaaattaaggaaacctctgagtttatgaggctgcttatcacatttaaagttgacagtatggttcttaggaggcagcagaatgattatggtaaaacactgtaggtagtaagagaacttaaatgccaaagatcattttacccaggaaaagaggtagagagggagtaatgaaactaaaggctagacctaaaacttcaagctttattctttcagagcaatttcctttttttaaatgtacagaaaaagaagtacttaaaataattaatagaacattctgtaagtaattcaattatgctaaaattactttgactgtctctctgcactctcacagtatttgggtaggttcacataggatgaagaagagaattctaagtcagaatgttaagagttaatgtttcctttaaataccagagcttgcctttgtgatttatgaaaatggaacaagattgtgggatctttgaaaatagagtcaatatcatatttattcaatattctttttttttgacccagctctatatttatttaaaagactgtttctccactgttctgcagtacggcattcatcatgaagtcagcattcatatgtgatcaatacgttctctgttcttttcaacttcagtcaatttgcccatctttgcgtcactatcacactatctttacttcgatagctctacaggtcttaatatctggttgaataaattctccatagttgtttttctttctcaaaaatttgtttaacagctttattgagctataactcacataccataaaattcatctatttaaattatacaattgaatttatatgatgtatagttatagatatgtgcaaccatgactactcctagttttagaacattttcatcaccacatgaagaaatcttgtacttttaagttatcagcccctacattcccatcctttctccagccctaagcaactctaatctactttctatctctattctggactttcatatgaatgtaattatatactggactttcatattaatgtatataattaagtaatataatatgattatataatgtgtgatcttctgtaatcggctcctttcactttgcctggtttcaaggttcatccatattgtaccatgtatcagtactttcttttttatggaaaaattacattccattttatcatagtctacattttgattatccatttattcgttgatggacatttgagatgtttctacctattggctattaatactgaataatactgttataaacatatgtgtacgtgttttcatttgtacatataggtttcatttctcttgggtatgtacgaaggacgagaattgctgggtcatatggtagctctatgtctaattgttcacagaactgccagatgtttttcatccccatttcccagcaacaatgtatagggactcaatttctttatatcatcacaaacacttgttattatctactttgattctagccatcccagttcgtaagaagtattatctcattgtggtttttatttgcatttctctgatgactaatgttgttaagtatctttttatgtgcttattagccagttgtgtatcttccttggagaaatgtctatacaaatactttgcactttttaaattgtgtttttaattattgagttgtagagttctttgtatattctggatataagttttctatcatatataatttgcatatattttctattatttggattgtcttttcactttcctgacagtgccttttgaaaaacagaagtttttaattgtgataaagtccaatttttctattttttcttttgttgattatgctttcggtgtcatatctaagaaacttttgccaaatgtaagatcataaacatttacccatgtgtcttttgtctttttcattcttgcatacaaatataatttcttacataattaaaatatgcttaatgcatgcatattaaaaatgtaattactagaacatcaaagaggatgaatgttaaaagtatgttaattgccactgtagaatattcaggttgttttctgtgtttaactactcttatacgaaaaaatataagggttcaggtatattgctagtatgctttggtcttctttaccaaaccttcaattagatgaaaataatttgtataacccccaagctaaaagattcaaaatagtattttcaaaatgtgaaagcttagttttgttaacttaattttccttaaaagcatcacaatgaattcattgatttttctaaaaaaaaaactcattccttggactatgttaacttttaaaatgtttactaaaaccagtgtgtttaataagagcatgacttacataatttatttaatccctattagtatattattcctggatttctcttaaaaataaaagcaaaattatttaagttataaacatgttataaacatatgtgtacttttttttgtacattgtcatttttataatcttattttcaggttatattagggtttattcattttggggtaagaaggcataaaatataagaaagcaaaaattataaaaaagatgggtgaatgaatgaatagctgataccatgaaagagggaataatccataaattatatagatatatatattcttaagtaattaaacttatgagagtattttttcctctgtccaatttcatttacatttggataaatctaactggaaagcacagtttatgaattttactgtacagcaatgagcaactagattgtaaaagataataaactcaacacatagcctatcccatgtcagaatcaggtttaatgttgaatgttgcattttaaaaatgacaaattcaaataaatatttacaaagaaggattgacagaatgtaaacattctagaaaatattttatagaggaagagttgaagaaataggagtgttaatgtaactaatagatgacttcaggaaacataatggctcttttacatttttgaagaatagcccaatagaagattgagttatattcataactaaagagaatttagagttaatacataaaaattataaaacgatggttttgccaacataaagatttttataatattttccaaagttgtagagtgactcaggttgcagaaacaagactctgaactcttctacatagatattcttacgtagtgtgtgatgcttctgaccaggcggcgttggtgtttgttccacccgtaggccctaggattccataacacgttgttgttagatcctccgttaaaatgtctgaagacacatagaaatgaattgtttcagtcactatttttctgaaagtgaaaccacattactgaaatatattattttttgtcctatatgaggcacaataccatgaccacctgttcgtagaatgcatctaacccagtctttgttatttacggggtttgatgatacttctgatgcaattgaagaggtgaaaaaaatgttctatattttcagtgccaatgaagcttaaaatagttggaattttatgaagtactcagttttctgacaagaacccgctgaagagtctccttagtgcatcttcatactgatagctggagactttgaacaccaaggctatgtatgacttcccttggagagacaattttagtgtggtgggtacactccaaattgaacctgtacttttgtagagggagtgccaattcttcaacaatattctctgttacatgtagcttatagatgattatttttgcctaatgtaaaatcaaatgaacacgtgcgtaacttttttctttttcttttatttcttctgtttcctcactctttccttctttctccttttgttagttagtaatttttttattaccctggtgagattaaacctggggcaaagaattatttttacttcaatagttggggtaaataaatgcatatagaaaaatagacacatttatttttgatacagatgtctaaaactgtcaaggatatagactgaaaaggagaaaaaaaacccaaaactcaaatttgtggccaactcaaacttgagaagaccgaatctgttttgttcctgaaaaagaactagtgaagagattgttgagattttatacttccaggacaagtatctaggatagtttttttacttgcaaggcagtggaaacaatatgtgaaaatatatatgaaaaattaaaattatgtatctaataatgaagctggatagtactaaagttataatgtgtgctttcgagttaaactaccgtatttgataccatgttccaacattcttttatttttgtagatcagctacttaagttctctgtgcctcagttttcttatctgtaaactgtaagtaatagtagtacttgttacattggatattatgaggaccaaacaaaataacagatttatctaaaactaatagcttataaaactcttagaaacatgtatgacacataaaaattgctcaccacgtgttagttattattttctactattttaatgcaaagagttacaaatatatattatttgctttttcactctgaaaactctaaggataaagttaaatacattaatcactcatcagacttatttatgctcaggtcgctggaacactaagttagttctcagtcttctgaatatagatgcgtcggaagagactctgcagtagtttgctagggctaccataacaaagcaacaaagactcagtggctcaaacaacaaaaatttgtccaagatcaaggtatcagcaagtctgggttcttctaagggctttgtccttggcttgaagatgactaccttctccctgtgtcttcacataccttccctctatacgtgtttgtgtcttgatctccccttcttaaaggacactcatcttattggattaaaattcacctgtacaacctctttttaacctacctacctctttacacatcctgtccccaaattcagccacattatgaggttctgaaggttaggacttcaacatatgaatgtgggggttaacagggaacaattcagcccatagcagtctccatgggtgatgagatgctagagttgagtatgttaggattggaacagaattaaccaaaacagtacattcaaggtgtggcccagggagccccatgagaatgtcagtttgattaatggcaggaaggcagcctctatggcagagctcagaggagctgtggggacatgcttagcaaattatgtacagctgtaatttgtaggggtcttgagaagcctcaccaagaataaacatctagattggccatgggcattaacccattctgcaggcattaatgaaggatatggggatgccaaggcctgaaataagttttaaagtgtagaaaatttctgaattttttaaggcaatatacttcaaaataagtggtgaaattcacaaactttgttaaagctaaagtggaatacagagcctagcttaataatttgcatcatcacaaagggatttggataaaagcttgatgagttaaatttaacactttgaagatattgcaggtttagttctattctagactactgcaataaaccaaatatcacaataaaacaaatcatttgaacttttttattttctcatgcttatgaaagatatgtttatactatactgaagtctaataagtatgtaatagaattatgtctaaaaacagtgtagatttcttaattaaagtaatttgttactaaaaaaaaatctaagaatagtcacagcctttagtgaatcataaccatttttctggtgtagggtcttgctttgatgttgatgactgatgactactcagggtggtgtttgctgaaggctgggttggctgtggcaattttaaaaaaaaacacaacaataagatttgtagcagtgactgaatcttcctttcatgaaagatttctctgtagcatgtgatgctgtttgatagaatgttgccaacagtagaacttcttttaaaatgaaagtcaatcctctcaagctctgtcactgtcttatcaactaagttgatggaatattctcaatcctttgttgtcatttcagcaatattcacagcatctttgctagaagtagattgcatttccagaaatcgctttctttgctcatccataagaaacaactcctcatctgttaaagttttataaagagattacagcaattcagtcacgttttcaggcttcacttccaattctagttctttcatgcttttcaccacatctgcagttacttcctctactgaagtcttgaactcttccaagtcatcccatgagggttggaatcaatccctttcaaaatcctgttattgctgatattttgacctcctccgtgaatcatgaatatttttaatgacatttagaatgatgaattcttttcagaaggttttcaatttactttgctgagatccatcagagaaattgctatagtagctatggccttacaaaatgtatttcttatgtaataagacttgaaagttgaaattacttcttaatccatgggctgaagaatcgatgttctgttagcaggcataaaaattaacattaatctccttgtacatctccatcagagctcttgggtgaccaagtacatcatcagtgatcagtgacattttgaaaggaatctttgtgagcagtaggtctcaacatgcacttaaaatattcagcaagccatgctataaacggatgcactgccatctaggcttcgttgttccatttatagaggacaggcagaacagatttagcataattcttaagagtctttggattttcagactggtagaagagcattggcttaaagtcattgtatgcattagccccaaacaagagagtcagcctgtcctttgaagtattgaagccaagaactgacgtatctctagcaatgtcttggatggcagtttattccaatagcagccctttttgtctacattgaaacctattgtttagtgtagtcctccttcatcaattaccctaggtagttctagataacttgctgcagcttctacgtcagcacttgttgcttcatctcgcatttctatgttatggagatggtttctttccttaaacctcattaaccaaacttgctagcttccaactttttttctgcagcttcctcaagtttttcagcatttgtagaatttataaaagagttaggattttgctctagattagccttggcttaggagaaaaccgtggcttgtttaatcttctatacagatcattaaaaatttctacacatcagcagtaagacggtttccctttattatcatttgtgtgttcactggaggatttaaattttcttcaaaaacttttcttttgcatttacaatttggctaacttgtacaagaggcctaccttttggtctgtcttggcttttaatatcctcactaaacttaattatttctaacttttgatttaaaatgagacttgcaactcttccttttacttgaatatgtagaggccattgaagggttattattgacctatttttaatattattgtgtctctggggataaggaggccccaggagaggaataaaggaggaaatggctggtcagtggagctgtcagaacacaacattcatcaattgaggctgtcatcttatatgggcatggtttgtggtgccgcaaaacaattgcaatgtcaatatcaatgatcactgattacagctcaccatacagatataataataatgaaaaagtctgaaatactgtgagaattacctgaatgtgacacagagacacaacttgagcacatgctgttggaaaactggcacctgtcgacttgctcatcacagggttgccacaaactttcaatttttaaaaaatgcaattttgtgaagcacgttgaagtgaagtgccatgaagcaatgtgtgcctgtatttggtgttttaatcagaatctttaatgtttttcttaaaattcagatggtttggaaatgcatcctgaggacacaaacatacagcaaaccgaagcatctattgtaccccccaactatgcatctctcatagtgccttacaagagggaaacataatttgagaaaatagagtctattaagcccctcagatatttcacagtgtacatttttgtgttgctacaactttgtgcattcctctttctgttccataaaaaaaggaactgctagaaactcggctcttttccaaattgctatgggtcccatttacttttgttttatgtggagctactctgcaatataaacactatttttgttctgaaatagaattattatgttttaggtcacattggaaaacttgtgcatgtctgggataagcactgctttctgattttcccaagaagcaatctttatcttaaataaatggcctggctctttcttaagccattttaatttgaaaagtaccaaaggaatagcaaatttcaaagtctttatactgctgcacctgtgtgtgtgtatatatgtgcttcttatcaagataattctgttgctttgagctctctgacactgggaagaaaacatcccacttcatatatttctggccaggtttctatgattaattttatgctacaagagaaaattccaaagacctgtagtgtcaaagatcacgttgaacagcctagcttttgatgttctttctctttttaagaaatcacatacatgtctccgcatagtctactcagttccagaattatgaatgatgatcagctcttgtgacactatcttaataaattcttcgatttcatactacttttttcaacaagtgtttattagataactatgttattttctgaaatatcctaggtagtgacagaagtatgtgaaataatcaatctttaaattccttacattttaaaaaggtaacaagatatgctaaattgtaaaaacaagtagtgtaatcataggaaatgtatataaagaaagactaaacataatatacatttaaatatccagatcaatggacaaataatgagaaattttagttttactgaagttttctaaatacactccaaagaagatgtaggatttgagacaggtgaagaattctgaaagaggaaaaataagatcaatggcttagcaacaagggtgcttgtgactcatatgtcttgtggagaccagctagtctgaagtgaggccaaaagttgagagttgtgaagagtctagactagcaaaatggaactaaactgccccatggagcttggcacatcatataagggatagaggcgcagacttggtccaataagtaatgaaggtgttgataaaggaaatggcgtggtaaaaacctactttgtgaaatgtaaatttgctgactgtgcaagacgacatgactttggggacactatagttaagaaatcttgtcactttccatatgtgagttcattagagctggggctagggtgaaagcagagaaaatgagaagaaaatgtcaaacaggggagacattaatgcaatgaatttggtggtaacttacataataaaaaagaaagacactacagtccattgtagcattccatatttggtgcctggcatctgatgtttccagtaacagaactggagaaactagggaaagtattactaagtgggaaagacaaggaagtcagtgcctggactaataagataaacttgggggtcctctgagggataaatatcataaaggtgatagtaattatcaatcagaacgaagttaggatggtgatattgatttggaaaagggggcattaaaatggcaattgtaaagtctaagtaagtaggctcaccaagaaaaacacagcagagagagaaaagtagaggacaattgataaatggtttagtcatgttcaccattaggagatggaggcttccctccatccatgtgatgaggatgtcacatcaaagaggggggaatagttggagaggtagggagttttcctaagtaatgtcatggaagtcaaaggaggagggagtgtttgtttgaaaatattggctttttaagtataaagcagaacaagaaaggaaggaaggaaggaaggggaagacaattcctttaagtgagagaagagagttataactcgactcttaatagagctatttagtataatagcaggaacaaaatcataattgcagggtggaagggaagaaaggcaaggtgaagtaatgtaggtagaagataaaaccaacatcattgaaagtgcctatataaaagatgtgacaataattaggagccagaggataaagtggaggctttcccattgcgcctccccaaaagaagagatttctttacatatgtgaaagtaaagtatttaagtggaagtaaagtatttaacttatttgagaagttaggatttaaagcatacatgaagtggtaagatgtgtctcttctccttcaccaggttaacctctctatctggatctttgttagtgcatctttttaaatctctcccaaaacctcgtgtcattaattcttttttttttttttttgaggttttcattctcaagcagctgtctgcactggcttcttgccagtgtctgcaaacacactctggtctccccatccacaagatattttctcttacttgtgctatacctctcagctacaagctctctctttttccctcttatagagttttcttcccttacttttactagagcttcctttgtgttcatagttctgcacgctccacaaacactgctcttgtcaagattattaatgcgccttcattaccagatcaacctgctgatgtctttttccttcttaaaacactgtttctttttggttttatgacaccacactccgggctttcttttatctctcagtattctttgctaattgcctcactgtcctctcttcctctcacttgttctgcaatccaccacgctgctctcgtggctccagctgtcattcttgtgcacttgagtcccaattctggataagggcctacgtctctcctgacttgcagactggatactagatcccacacaaccctctaactcaatgtttctatggctgaagtcatataggatagatattcccaaacctgctttcctcctggtgttctgtatctcaataacagcccactctccgctcagttatccaagccagaaattttgctgttatccttgctctctccttcttcctcttctctcacatcccatctgcgagtaagtcttcttggttttatttcctaaatatctactaaatccatctatgtcatttcaccttgactgccaccatacttattcagggcactataattttggcctaaattgttgtagaaaatcccacaactgatgtctttgctactggtttttgtccttttccacctgtttccttaacatctcttctgcaattcctaaagcagccctaaaatatgagccaagtcttgttatttccctggatggaacacttccgcagctctccactgggctctttataacatacaaatcccttaacatgcctatgtattagctttttaaaagtattaaatactaaaaatattaaatatctgtgtgccagacattgtctaacataaccactgagttcctccaatgaatgtttttgttttgttttgttttgtttttttagatggagtctcaccctgtcgataggctggagtgcagtgatgcaatctcggctcactgcaacctccacctcccaggttaaagctattctcctgcctcaacctcccgagtagctgggactacaggccatgccagctatttttttgtatttttagtagagacagggtttcaccatgttagccaggatggtcttgatctcttgaccttgtgatccgcctgcctcggcctcccaaagtgctgggattataggcattgcgcctggccccatccaataatggtttaaatcaaatcggagttactgcagtgcctctttgtagtctctgctttccacgtccttcctagtaaatccatgcggacttctccgggaaaatctcttattccacctcatgtctgtgcttcagccagattaaatcttttctacatgctctctcttgtgaacatgctcttttttatgcctacacctaatttccatcccacctcactgccttttcttagctaattcttactaaaattttagatcataacttgcatgtcacttacttccggaagctggcactaatatgctaccaattccagcttgcacatcaatgctatgcacttccccaccattcgatatttgccactcaaggcatttatgatattttattataatcacctgtctaccccaatagacggtaagctttctgagatcgttacttgttttgtccacctttgtatctgtcaaggcagtggcctgcagagagtaagtgcctggtgattatcctttgaatgagtgaaggaatgaatggttttgatgtaggtttatgtctatataaggaagataaatgaagaaattcaggtttcaatgctcttatgaggtaagagcgtctgttcagaatgtgagtttggccacaggaaaacgtaaacaaatagaaagaaacatggagttctggagtagccttaatgatcatcaagaagaaatagaattgttgaggtatgtaaggaagccagagtaaaattggatggcaaagactgaacaatgatttctgcacctttctccagagggaactgtgctacagagaaagagctcagaactcagaagttggttgatagaagcccaaggctgagaatcaattcagtgcttagagtggcatgcactagtatgtgtgtgtgtgcctctgtttgtgttggagatagaggtatctgtgaggtggtgtacagcatagaaatgatagtggttgtgaagccaacatatatatatataaccaaacctaaaatttgaatgaaaagagatccactctgctggaataaattagatgatatgtgtgaatgggagatttagaatggctacaggttccacttcacttcactagtgaaaggaaggtattgagagaagagaagcagagcatcaaagaatttatcaaatttagtatttactaatttatctcattgcctgtaatgacagaaaactacttttcacaaatataggtgtttctatccaagtcagaactggtcaataagaaatagttgattcttcactggcaaaattgtgatcaataggatgattggagtttcttaaaaaaaaatgtgaagtccctttccatatttcttttcttgatttcaatcagtgtagaaaacaaacactggaagactcatttccccagggcaactaatttatccatttaatgcactcattttgggatgaatcaataaactctccaagtatttattgatcccctatttttggcacaagatgatgctaagtactgagagtaaacaagaaaaatataaagcatgatctctaccctctcaatctgcagtgtgctcctgtgtcagttaatctgccctgatttcattgtcatttcacttttgtatactaggaacagtgttgtgatggtgttagtcgttaacggtattagtgacaaagacttttactgataatttcttgctatttagctggtcttccataattctttttagagtcatccataactactggctcttttatgtaatcaactgtcttttcatttttttaaataaaatgctaatttgatagcatgttgtaggtgatagtaagcttcttgtgaattttaacatcaatattccctatgctattccgtaaaatgtgctgtttcttacttaaagaaagacctgaattatagtgttttctgaatttgcattgtgatgtattatagctttggttttattaatattccaagtaataaaacctctttagtctaattaaccttttgttccttctgaaagttctacaattacattatcattatttatcattaatttgtacaattattcattaaatcatttatttatcttccttcttaaatatagccattatgtttatgatttagaaatattttccaagtcttacttggattttcctatttatatgtagctaagctttattgaatgaattttaatgactttttctggaatttcataatttaaacatgaaagctacagagccatgatgctacctttcacttatgagctgagattttgtctaaatttagactgagaagtgcaacttctataaccactattgatgtttatgtggaaatattttatttaagccgtgaatcaatgtcacaaaccaaagaagataaatggcagatacatttgttgcaagacaccatcagtgaatctcatagccagtgatgtggttaattcatgaaagaatgaaaataagacaaagtaagaacacctattatttctgcattgataacatcttgcacttttattctaacagataatgctctgcccatcttttctcatagtcaaaatattgtctgtaggaatgcctctttctggattaaagcagtaggcgcttctagaaatcttttgaaacactggagtgactggtctaaaaagccaaggctatactgcctgaaagctatttacaagtgggatagttacccatttgtgcagaaatggttatatgaacctttattaaggttagtggactctgaaaaatcttctgggtttaagtttctattatttgtctaatattttctttgacatttcgaagaattctaacaataaaaattcttagattcaagccttatgtcttccctttccatggacattctgctttgatggctaagtaaaagagacaaatccctatggctgttgatgagcagtgcagtagaaaaatgatttctaatcccactcaaaattttgcaaaatgcaaactgataaacatatgatcacttcaggagcattcaaaatggccacaatcacaggcacgttctctgcaggacctgcctacttttacaatctgaagctatgcagtcatataattggaagcattcccaccagtcccttttgaggcagggaacttaggctgaatatttaatacgagtatccatagagctatagtgaagaatgtggacatgaagataaataatgggaactcttataaaatctgggccatacatatatttttatattgtgcagtagtacatagtagtacatacgtacttacatctgctatgctttgttacttttcctcactttactcttttccccttgtgcatagtactgagttaatattcagtatgcacagctacataattataaatgctaagcaaagtttctagatttatatgctctgcgaacagagcagcataacaaattaaagattataaatcaatttagctatcccaagttggaaacttttaaaaatgtgtttattttttaatcgtttttttctctccaaacatttgaatactttgcctttgatatatgttttgttgtggtggttgtttccccaggaaatatatggaggtattcacaggaagtcaacatttatttgggatccaattgttttagtattatttttttccttagggcactgcctggaaattcagtataaatgttttttaatgcacaaacattgcttatcaacctgtcaatcaaggaatctttgaatagaagaataatgctaatttaattatcatttgtacatattaaaattttgtgtaattttaccttcctgtaacacaaaggacagaaattaagaacccaaacccatgtctaaaatatgaaacttgaaatcttaatgtaattatctatgatgcaaacttatagaagaatttctaattgtcaaaagatgtagaaatctattttaaaaaatagattcctgctaattgacacagtacttagaagaaaaatatatatattcaaaaatacgtattgctaatacatattctaattgccatagtccttagtagaaaaaatatatgttgaaatataatttttaaagtgccaggaatagccttttaaacacattttggcaagtttatgtaaacctcttaagttagatcactttaaatatttctcattttcagaaataaattctgaaccctaaccacatagataaattttctaattagaatttgtggtttgtggatatggagcaaaccatttcatgtgtcaaaatagccgattttagtctcacacaataaagacagataatttgtcctatatttaggttacataattttgccatggatattaaactctttttatgtttttttatttttaatttttgtgggtacatagtaggtgtatatatttatggggtacatgagatgttttgatacagacatgcaatgtgaaataagcacatcatggagaatggggtatccatgccctcaagcatttatcctttcagttacaaacaattcaattacactctaagttattttaaaatgtacaattaatattaactatagtcatcttgttgtgctatcaaatgaaaggacttattcatttctcctatttttttgtacacatttaccatccctacctcccctccagcctcccactacccttctcagcctctggtaaccattcttctaccctctatgtccaatattaaactcttttaaagttcaatttttcaaattattagctctcaaaaaatcagtttgttgggaaacagatttaaaattcaggtgtggactagaatattacagaataaaatacagactacattgcaaggagtaatattagtaagtgtgttttttgaaacttttagttggactgtgtatgtatgtaggttctatttgcaatataatatatataggtaaaatatatacatataagtattcatttttaactgtgaataaaagtgattgactgcaattattctaaagttctatctttttagtatcaatagccaactataatagttgcatattattattagttgtactaatttaagtgaaccattatttactgaataataactgtgcaccaagtaatgtgtgatgcccacatttttatctattactagtccttataattctgtgagatgatagttaaaattttccttgttaaaaattaagaaaataaaacaggccaggcttggtggcttacacttgttatcccaggactttgggaggctgaggcgggcagatcacgagatcaggagttcgagaccagcctggccaacacggtgaaactccatctctattaaaattactaaaattagctgggcatggttgagggtgcctgtaatcccagctactcaggaagctgaggcaggagaatcgcttgaatccaggaagcaaagttgcagtgagtcgagatggtgccactgcactccagcctgggtgacagagctggactcccatcaaaaaaaaaagaaaaagaaaagaaaacataaaacacaactgattagaacttgaaaggttgcaacgaacacactgatataagatttttttatacttgaatttttcaggtctttaaaagatattatttcaaataactgacttcagtgattgagttctggaaattttgagttaaacctagtgttttttatgcagtaattatttggaaatttaatatgctaattggtatgttgaatcatcaaataaaaagagatgaatacactatgaatttctgaaacttatttcaccttagaaccatttaaaaatattatgtcttcagactatgtttactggaacacaccctgagaaatgcttaatttaatcatgtcaatacatgtaactcaaaagagacaaggccttataaagcaaatgtgtataatgtaataatatttgatagtgtttccttgaaatcagactaaactctaatttttctattagcaagactttaaaaataaaagtttttaatatcttcaagttcaagattcaatttaaatgatatactctggcccattttcctagggaacacacttcagtaaatttagaaatagtaaatgcataatgtttactttcccttcacaaaaattgcaatgtaaatttatcattaccatttatgtttttaaaatagtttgcagtggacaattatcagacattgccagcaacctatgtttcttcaagtcacttcatgttgaagttactccttcagtacacaagtacataaaccattactatttattttgttccatctcctttcacagattttaggaataggaaagaatttcaaatctgtttaagctaatgtatggatttcctaagtgagctgaacgcagtggtccttttgcctaccactttacttcaaacattatagcctcttttcctcccactgatggtttacaatacacaagaaatcgtgagaaaaattaaaaattaaaaaaaaaaacggaaagaaaaaacaaagaaaaccaaataaaatacactagaaagcaccatcacaagaggttctgctttaatggtttgcagtgtagcctttaaatctatttttttttttaagaaatgtcctgtgtgtgccataaatggaggaccacagaagggtttctaatttctgccgtggactagcgaggattgactcactgactaggctactgagattcatattctttgctcctatcagcttttctaagtcttgtgcgttgggccctttcttatctgctcaaggttccaatgcacttcccaccaagcttccatgtgagccagctttatcttcagtctcatttttctgtagagttaccaaagctgtctatatctgcagacatatttagtcgggtggccttctgttttccagtgttccttcctaataaatctctctgcctaaagaactggcatgactacagggggacataaggagatgagggtctctcattgtgaactacttgttcttgttcccatggtaggaaaacccttttcttcagtcagagatcaggaggcttcactatccctttcttgaagtgttttcactcctttacggcccaccctcctgggagggcctgggagacacgaatggctcacctgttagaacttcctggacatgcctgcttctgtaatttgcacagagattagtatgcagcactgaaatactagaaaaatagtgtctgttataaatgcaactattgcttctattctctttaccaccacagcgacactggtaagcactttacataattattacatttaagcctaaacacatacttttaaaattggcatgtgcattctccttttttaatgagccaaatgagtgacagaggggttaaatcattttcttggagtaactccagcaaaatttgaacctgaagcaatgtgattctctggcaaggttagccttggtatagaatgaagctcatttggtcactatgaattgatacttaggacagggctcaaaccacatgagctagccttatctgtctcttcattttacaagaacagaattttaatgtctacttaccaaggttgcagggtttgtctctatatattacacaacaaatttaaatagaacctttttctgcaatggcaggttgtggacctgctcagagaacagaatgccctcttgaggatggggagcagggcaagactggcctgcacaagtctaactgactaataattcatgttgggagtatcagcaaaggtggaggaagctaaacacagatctgagggagaaggaattatgggagggtttggcattttgtggagggatttaattcttatatgagtcactgagtaaaacacagagagggagaggctaactaaagaggaagggaaatgaatcaatttggtggtgcagagaaaagaattagaagataaacatggaaaatcagaaggagaaacagtagatggaattagataatcttttgataagtccttggattttttttctaaaattctggaattcacttacatttacaaatatttcaaattaatcaaaataaccattctactattgtcaatgacagagaggcaacacatttacccagcatatattttctggacacgtattgaaccacgtgctagatcaaactacacaggaaaaaaaatcacctcagtttgcttaaagtaaggaaaagagagaacccatatacaaacatgtactcaccatataactctgaggcaacaagcaatttatttgtcattgacactaaatgaactactatataaaaaaaataccctgacaggaactggcttgagaataacaaaccacattctctgaaaatgcagtctacaaacaacttagtttagttgaactaattgaagacgactaacggtgtagttgctctttatcttcaaatgagaattatgtttgaggccaatgaatatcatgatttaaccataaaaatattagctagaatttttattaaatggaaacccataccataaaaacactcatgaaaaatctgaaatggttctattaatatccagcaaagtgaacttaaagacaaagtattaccagaaataagaggcattttataatgctaaaatggtcagttcatcaagaagacatggctgtcctaaatgtgttggtaccttttaatagagtatcaaaataaatgaagcaacaactaacagaaatacttttgatataaacaaatccacaaataaagttagagattttagcactcccctctcagtaattgataggacaatacactaaaaattggtgtggatatagatacagataatattacctaccaactcagtctgcttgaataatcttcctcctatgtgacaataaatacaacaaatccaaaatgcacaaccttctgaagagcacgtgtgcacatccaccaagacatatcacatggcgggtgtaaggcagtgtggcaaaattcctcatcacctgtccttgctccttgtgaattcaccttgtgaatgtctcaggttgcaagtgtcctccactgtcaagctgtccacatgcggaacaatgagaaggagaatggcatgcagggctaaagcatggcacctttccttccacactctcagttgctttctccattgaatcctgaatttttttttttttttttttttgagacagagtctcactctgttgcccaggctggagtgcagtggcgtgatcttggctcactgcaacctccgcctcccgggttcaagcaattctctggcctcagtctcccaagtagctgggactacaggcacacgccaccatgcccagctaattttttgtattttagtagaaacagggttacaccgtgttgcccaggctggtcgcaaactcctgagctcaggcaatccacccctctcggcctcccaaagtgctgggattacaggcatgagccactgcacctggccctgaatcctgaattttatgtacatactttatttgccaggtagtgattttccaccatgattcctttcttcctgaatgtctactctttcctttatgaccaaatttaagtttcagtttactttccacaatgtctacaatccactcttctctctactttgaacatcgtaagcatatactacatattattgtttaactctttcctgcatttatgctttatctcctccactgaattaaaatttttgtgagagcagatgtcacactttgcatttctttggaaatactgcctaactaattgctcaataattgcttgttaaattaacatggcaagtaaaggttgaaagctaccttttgaagttttatagcttcaacttacttttggagacatatttttaaggtgtcttacacatggcctacatattttacaaagacacatgtgctgctaaaagatgaattgagctactattttagatagactttgttgtgaaagtaaacatgcaatggacaggccaggtgtagtggctcatgcccgtaatcccagcactttgggaggctgaggccggtggatcatttgaggtcaggagttcaaaaccagcctggccaacatggtgaaaccctgtctctactaaaaatacaaaaattaaccaggcatggtggtgggtgcctgccagttactcaggaagctaaggcaggagaatcgtttgatcctgggaggcggaggttgcagtatgcagagatagcaccattgcactccagcctgggcaacagagccagattctgtgtcaaacaaaacaaaacaagacaaaacaaatgcagtggacaaaagtcaaatgggaactggaatcagagagataagaattttaaaatactcccaaggtaaacagtactttgaaattgagacgggagagttcctttgacaccttcgcaggacttgcgacaggggtgcagctcgcttactctgccaccaccacgctcaaaccccttgcaggaaggggagcacacaggcgagcgggtgccgggtccggggcgagcacttctgggctccggccccctgataacgtctaggcgagtgtcacaattaatgttcttttagcagttgccatccgtggacagctaagggttcatcagctcagtggagattcggggtgacagccttttaaactctgccctcgtggtacccgggttcttgtccgacatccaggaagattcaggtcacatggacttaaaggatggtgaatgcggatattttattaagaggtggaagtggctgtcagtggaagggaagatgacgagcggatggtgcgggaagaaggtgatctttccccgaagcctggccgtctgcgctgggcttctttccgaagtcgtgtcatcggaagttaagccgcatctatctgtagtctccgatgctcagttgcttcttctcttctcgacattcagctgcttgtctctttgccagctgaggtctggggtttatatgggtacaggacaggtgggcagggtgagccaaaaaagtaacatttaggcgggaaaacagggataactgttctcatttaggacctcgggtccaggcttgagggtggagccctcgccagggacgccgccctcttctacccagtattttcctgcctcctgtctgtatcaaaatgatgcttcgaatttagttttaaaattggcattatcatatcttaaattaaaagtttatcgatatgggtcaccaacacatgttttttaggattatgtttctaggtggcttccactcagtgcctgcagaaaaaaacaaaacaaaataaaaaaaaaacccaaaaaacaaaaacacttgactaggagtctaggttttcagttttaatatcaagtcagtgaataaaaaattgtgagcattatgtcatcatattgctctgagatttttcttattcacctataaaatgagacattatatttatatcacttaaggtaccttataagtctaaagttccatcttagtttacataagagcttcacacttaaagtgtcatagaccaatagcaatggtgtcacctgggagcttcttggaaacacagaatctcatgtcagaccttagctcagatctcatctgtacattaaaattagaaaagcactgttgtagagtgtatatgttaaattgcatcacataaccataaattggatgcatactttttttataataacagagttggtcattaatgtgacctattattattatttgcccagaaagctatatattagcagtctattatttactgagtatataattctcatcttgaattttcccctctcctcttatacatgggaggtatggcattttggtcctcctattttctatctgtatttgcctgcttcagacctagggattttgggggaaattttacacaataggacaaaagcagtacatggacactattgtcttttatggtttcatcccaggactgtagtctctatctcttctgcacattctaagtgaataatagactaaactatactgacatttctttctgaaatgaacaaaatatttggtttaattagtttttcctgttgcattgcttgacattagctataattaatgtgttaaatggtacataagttttcagagtttcttaatagacaacaatcttggaactcaccatttttcttttcttctaggacagatggctgtgttagttacttaatgtcattggtgattttcactatgttatgttaattctctccttgtatggcattactctgtcttgccaatttctaaaaaatgtgactatatgatatttaaaaagtaaaatattcaatcaaatgttccctgatttttctgttaaaattaattattttaaatgaactactcatttcattgagtgaaacagtaaactgattgatggagtgatttgacattatattaacacaggcttgttaatttctcctttaccattctcacaaactaaactgagaaaagtatacttcagcctgcctctatttctgtgttaaaaatcttcatcaatcttaagtaattgacatcttcattattcttcaattataccactttgttcctgtatatccaagtgagtttattttatcacatttctttccactgctaagatcttcctttttcaacaagtccctacttccgtcagttcaagtgcaagtgaatctataacaaggcacattattgtgtcatagaaagctgtaaacatcttagtttagaaagcagaaatattgatttagaattactgttcagtatgccttctcatgaaaatcaaagggctaaagaaagtcaataggctactgtcttcaaatcatccacatatattgcatatttctggattcaacatgcttttttttcctccttgaaagtaagttgtagtgttccctttctatcaggtacagaaggccaaagcctcatttctttgttatttcaatagcttttggggtacaagttgtttttagtcacatggataaattctatagtggtgggtattagtctgttttcacattgctataaagatactacctgagactgggtaatttataaacaaaagtgccttaattgactcacagttccatatggctggcgaggcctctggaaactaacaataatggcagaaggtgaaggggaagcaggcacctttttcacaaggtgacagggagacacagagagaaggtggaagcaccgcttatcaaacagccgtatctcctcagaactcattcagtgtcatgagaacagcaagggggaaatctgcccccatgatccactcaccctccatcaagcccctcctttgactcgtgggaattacaattcgggatgagatttgggtgtggacacagagacaagccatataattccatcccccgcctggcccttcccaaatttcatgtcttttcacaattcaaaaccaatcatgtgttcttaacagtgccccaaagtcttaattcattccagcgttaactcaaaagtccaagtccaaagtctcatctgagacaaggcaaatcccttctgccgataagcctgtaaaatcaaaagcaagttagttacttccaagatacaatgagggtgtaggaattaggtaagtgttcccattacaaataacccaactgggcagtcattaaacctgaaagcttccaaatctcctttgactctatgtctcacatccaggtcatgctgatgcaagaggtgggctcccatgcccttgggcagctctgcccctgtggttctccagggtacaacccctgtggctgctttctcaggctggcattgagtgcctgtgacttttccaggcatatggtgcaagctattggtggatctatctttctggggcctgcaggatagtggccttcttctcacagtctactaggcagtgccacagtggagattatgtgtggggcctccaaccctacatttcccttccacactgccctaacagaggctctccatgagggttctaaccctgtggcagatttctgcccggacatccaggcatttcctggacatcttccttttccaggaggtttgggaacctctacctagatttcatttcctctgagatctaggcagaggttcccaaagctcaactcttgtcttctgtgtacccaaaggcccaacaccatgtggaagccccaaggcttgcactctctgaagtaacggcaagtgtggtactttggccccttttaaccatggctggatttggagcacctgggatgcagggcaccaactcctgaagctgcagagagcagtatggctctgggcccagctcatgaattcatttttcccccctgggcctttgggtctgggatgggagggactgcctcagagaagacctctgacctgaaatgaagatattttctccattctcttggctattaacatttggttcctctttattcatgcaaatttctgcagccctcttcaattcctctccagaaaatgggattttcttttctactgcaatgtcaggctgcaaatttttgaaacctttatgctcggcttcccttttaaacataagctccaattttaaatcatctctttgtgaatgcatattactgaatgctttcagaataagacaggtcacctcttgaatgctttgctgcttagaatttttttctgccagataccctaaactatgtctctcaagtcaaaagttccacagataattaggggtaaaattttgccagtctctttgctaaagcatagcatgtgtgactcttattccagttcccaataagttcctcatctccatctgagaccacctcaatctggacttcattgtctatatcactattagcattttggtcaaagccatttaacaagtctctaggaagttccaaactttcccacatggtcttatcttcttctgagccctccaaactgatccaacctctgcctgttccaaagtcccttccacatttttatgttatctttatagcagtatccaactcttgatactagttttctgtattactcagttctcacactgctgtaaacatactacctgagacttggtactttataaagaaaagaggtttaattaactcacagttttacatctctggtgtttaagcctcaggaaacttacaatcatgatggaagcaaaaggaaagcaaggtatgtcttacatggtggcaggagagaaagagcatgcagaggaaactgccactttttaaaactatcagatcttgtaagaactcactcactatcaggagaatagcaagggggaaaactgcccctgggatccaatcacctcctaccagatccctcctcaacaatagggattacaatttgagatgagatttgggtggggacacagagccaaacaacaacatggtgtattctgagattctagtgcaactattacctgagcaatgcacactttagccaatatgtagtatttttattcctccctttgttgagctcccaaagtccactatatccttctgtatatctttgagtcctcatagcttagctcccatgtataaatgacaacttacagtgtttggttttccattcctgagttatttcacttagaatgatggcctccagctccatccaagttgctgcaatatttgtttctttttatggctggctaggtagtatttcatggtgtatatataccacattttctttaactacttattggtcaatgagcagttaggttgaaattgtgaattgtgctgctataaacatgtgtgttcttgtgtctttttcgtataatggctttcttttcctttgagtagacagccaatagtgggattgttagatcaaatggtagatgtacttttagttctttaaataatctccatactgttttcatagaggttacactaatttacattcccatcagcatgaaagtgttcccttcccaccacatccatgccaacatgaattgttcttcaactttttaattatggccattcttgtgagagtaaggtaatatcttattgtggtttcaatttgcatttccctgatggttagtgatgctgagcatcttttcatatgtttgttggccatttgtatgtcttcttttgagaattgtctatttacgtcctttgcccaccaaaagaacatggtactgatttacgaaataggcagacaaatggaacagaatagagaacctagaaataaagccacatacttacagccaactgttcttcaacaaagcaaacaaaaacataaattgggaaaggacactctattcaataaattgtactgtgaaaacaggcaagccacatgcagaagaatgaaactggatccccatcattcaccttttataaaaatcaactcaggatgatttaataaccaaattaacaatttttttcccaaacttctagctcaagtttggcatcaaagatttaaaatgaaggcctgaaaccataaaaattttcaaagataacagtggaaaaattctggacattggcatggacaaataattcgtgactaagactccaaaagcaaatgcatcaaaaacaataaacaaatgattcctaattaaactaaaagtttctgcagagcaaaataaataatcagcagagtaaacaggcaacccacagaatgggagaaaatatttgcaaactatgtatctgtcaaaagactaatatccagaatctacaaaacactcaaacaaatcagcaagaaaaaaacaagtaatcctttaaaagacttatttttattacctagtctgtcattacataaattaaattgccatcacttactcacagtgtgttattttcacttggactttagagacaagattccacgtaatgagaagtaacaaaaatccaagcatagtctatactgagtgattatctatttctgcattcccaagtgatactataataaatggactttgtctgcatgttatgagctggcttatacataagcatggaagtaaacccatcccaacttataagcaaagatgcaaattttactctccaaacttccataagagagatgcagagagagaaatttctttatgtgggttaatagcatcatctttatcctttgttaaaagttaaaaagcataacagatggataatagacgtcagtgatttcaaatcctgaaaagaacctgctagtcagagaggttcactcagcactcggaaattgatgaatgaagtaatcattctagcagcaattgtcttcagctggtcccattcataggtatcctatttctatcctaatttagatttgcttcagtggctggctagatttttcttttgaagtcactatatattcccatgcggctccattcaaattcaaaacaatcattattaatatcaaatattgggctatagaaattctagaagtactcatcttatgctttatttgaggtactagacatgtcataggatagcataggggaagaactagttattccaactgatactttttaagtatatgcaaattttaaaaatatcctggggaagtgttgagctatttttaaaagcatagaaagattagaggagcacagaaatgtatagaaaaacttctgttgtctgcattttctaaatcacatgaacactttactgagatatgcaaatttgaagtgtattattttgcatggtggctcacagggttgctctctggagcaactcctgtgatcaaagtgaccaacatcaatgcttatgttaatggatctccccacctacaacttgttaaactccatagaattcctccatttcaataacttccacccagtttcattttattgtcctttacgtgctgtcataccttggcccacaccatcacttgaactactttcattccatatcctgtactagaaaattattttataacaatatcatgtacttcattcattctctttcccgcattgaaccagatcttcactgtcattatgaccttcacttcttctataaatgttttttcttatcatctttgagaactcccctagctttatttcttcatttcctggttttcaccatgaatcatttcaacaataattttactaaggacttagaatcaatcccttgtcttctaatagtttgcaatattttacaaatacacgcacaatcttgagtaaacattatctcatatacctcagctatcaaacattgttgtgagtaaaaaagaacaataaatgaatcatcaataaacaactaacaatgtcaattctcataatttaaaaaactggcagcatcttcactttttctcagcattcctgtgacaattagctgagttgatgtttgaaaaagacagaataggctgtgttttccttcatgaacaatctcaaaatgttgctggcttaaaataacaaatgctatagatctcatgctcgttcatgtaggtaggggatggttttgctgacccagggagatggactctgtgccctttaatagtgcgtctgtcacaacaagccttcacggttctctaccacaagtaatggaagcatagcgctgtgaactagagggagaactgaaacttttagtaatcactagaaatagtttctacaatattctgatctttctcatcttttccaaatctaagatctatttcccattctttgccatctcagtagataatgttgctccctatcttattttgcaaacagatgctaaacaacttatcacccaatttctttccaccccacatttccctgtacattcattcatttttttttcttgtttggcattcctataatcgtaaagagtttagaatcagaggcatgcatggttgatgttgaaaaacagagaatggctgttaggaaaatagaactagttcatgaatcacaagagaatgaaaactcatatatcgtaatatgatgaggtcactaacaaaactgtttaggtgagatgtgaaatctgtaatccagggtagtagtaaatgtcagagacattaaagtaattgaaggcagggatatgggaagagtaacaactataatttcaccttcacaacagtaatcagtggccctaaaattgtgtttacagttgttttggattctcggattgggtctaccaacacccattccaaccctttacagagttgaaagatagaaaaccaaattaacaatttttttcccacgacttctagctcgagtttggcatctgattttgattttacctttcagatgcattcccatgatacctggattaggaactgaatcatagagacaggcttggtggaatgtatccactttgttggacaagaccatggaagatgtggcatcatcagcatctttgcattcatcagctcactgtagcagcagcagcagttttaccaaacatggcccacacagtgtggtttaacagtcaggaggaggagcagcagctacctgattgccagctttctaaaggggagatcactaacttcaacagaaaatgaataattgatgaatggggattgtttctaggaactcagtctaatgcagtctccaggctttccaacaactctgtaaactcctaagtccttgtaccaagtgtgtattgggctaaatcagctaacatcatttctattgttaacaactgaacaatgaccaccatcttggttgatagaattggttacatgcaacagaccttcaggaaaatgggaatttggaaaagtctacctcaagtatttggatctgaaggcagtgagaagccaattaacgttcgaagatagggcaggtatgagatgccaaataaaggcaagtcgtttatgaacaaggtaactactgaaacagaccattattggagtctcaaggattagaaaggctgtaagcttcgatggagagctcaacgttagaaagtgaaaagtcagcatttaaaattttccacctaaggtgttagcagagaacttaaagttttccaagatcgacttaaataataccttatattctttaatcttaaagctgatttggcaaaagtcaacttcagagtctgattctgtttattactcaattataacacaaattgaattcattatgttagataaatcatcagagaagaaggagacattagaattaaaatagtgatttgggaatattgagatgacatattaaatcttaccaagccagccggcagaaacagaccatcttgccttctgtgaagggactgggcctgcattgccaaaagacctagttataaatcatgtgtaatagcatcttgcactgggcagccatttctctccatgttttacacctaccagctatcattgctcccagacctttaaccaggtcatcaggctccagggagcaattaaaattcaagcctagagagaaaagttattggcaacagtaaaattgcaaattctttctttcctagtttatctcagagaaaaacaaaactaaactaaacaaaaaaagatagaaagctggaatgtgatataagatcagaagagactgtgttttctaacatgtttttacactgatgggaatgattcaatgaagaaggtaaaaataataatgtatagaaaacagagggacatttcttgaaccccttccttaagtgagcaagaagggataaaatctggaatctaaatacaaggaacctgaaacaaataaatagttcattacaactacaaaggaaggcagagtaagcggcacatgcagatggcaattgtgagctggagagtttgtgattcttttctgatatcttacttttttttttccagtggagcaaggctctcagtggagagtgaagatggaaaaggaaatagtgaaaatttgaaggcaaaaaagatatgaacgagtcatccaggagagtgagagatgagaaaaatggacaagagaaatataagagactttctggcagcagcaagggtcatgaaaaagttagatgactcaaagtactgatgtgtctctctagactttgctcaggtgcatgggtgcaggtgcagaatgggtggagggttagatttaattaggatgggacttttccagttcatcacaatgaagcaagggatcagcaagttatctgagagtgtgtgtaagaaagtgattataaagatgggttagggataagctagaaagagaaacaatgaaaggaatgaagttagtgaggacagggtgagcccagctgattattttggcccagccaaatgatttttttcaattggaacatcacaaggaatggatgagaaaaatagaataaagtgattggagtatgggattcttgaaatttagagtttggaaagtgtgcaattaatgacaatgacaaagtttatgctatgattaagagagggagtgttagagatatagtagaaggcaggatcattggataggaggagatttaaacaatggaggaactatggtattatatttatcatctatgtaaatgtcaaaatcacaggagattatgacagcagtggagttcaaagagtgacagtgaataagaagatacaaattttcaaaaaataaggttgagtgtctgaggggtttataaatgattttcacaaggtgagggaacaggtggtagaatctgaaaacatgagttttaacgtgaggactttaggagggatgaaaggatagcgtgtggttggcagtcaggagtatggagaatctctacagaacctgcaaagtggtgttttgagggatgtgggaaagaaaacaacttttactccacagaaccacattgaaatccacgtctttcaggtagagccaggcgttagagcagaaagccgagggaaacttcaaagaaaataaggaaggtagacagataaaacaacctgaagatatgaggaaggatagaaatacgtgtaaacagagcttagtcaaaacaaggacatgggccttgggaggaagggagaaattggaaattgtaggcttctggatatgcatatcagacaagggtaaaggaaaacaagtgacactcctacctggcttcaaggtcaattgtgtttgtgagacttggggtgatggaagaaggaggtgagggttcttaccatggaagagttttggattccatcttgattcctgcagaggaaagtgtcaaggctaagatgagagtggtattaattaaagaccatctctttcttcttgtttagtttatatttattcatacaccaatttaattaattattttttaatgagacaggttcttactctgtcacccaggctagagtgcagtcgtgcaatcatagctcactgcagcctagaactcctgggctcaaaggatcctcctctctcaaccttcccagtagctggaactacaggcatggaccatcaggtctgtataatttttaaaatttcttgtagcaatggggtctctttctctttcctaggatggtctcaaattcctgtcctcaagcaatcctctctccttggtctccaaaagttctgggattataggcatgagtcagcattccaagatcaattttatcttatttttcctctttcttcaactataatatatgagttgtactggtgctgaatagattcataattaatttagttcataggttatgcaagcccaaggtgaggtcacaccctaaataaggagaaataaatgtcatgaagatatagatgtaacgagtctctgggtcgtccattcattgtgatgatagggcaagtgcctagttggattattttgggtgagaacacattgttattggctggagtaaaaagttcttatgggtaagtcttaaagaaattaaattggaaatgtaagcagagaccagataactaagagcttactgttatttgacaagtagtttggactttattttgatgctcaggaagaatttggaacgatttttcagctacaagatgacacagttattttatttttcaaagaaagactaatctgacaattgtggataaaggatttaaaagagagaaggctagaagcaatgaaactaattgaagtggtaatgcaatggtgcatgtgataggtttgaaagacttatttaagagactggcagtggaacaagagtcagacacagctttgagacatatttacaatgaaggtgtgacaaggattattaactgacggaattagagattacagaagaggaatccaggaagtcctcagatgtctgtcttatgtgactcagtagatgatggtgcctttcagcaagttaggagatacattatgagaagcaaaatgaaggataaaaacaattatttcagtcatatgtaggttgaattgatagtgcataaagattgaattgatagtgcatgaagatatatagatggatacaacttgtaggcagaaatatgagtctaaattttggaaaaatagtctgggtgatgaaagagacttgggaaattttagtttatggatgcatttgaagtaattggtttagacaaaatgcctggagaaagaaagtagaatgcaaaaagagaggaaaaaaaattttttttattaacacaatattaagtagctgtaggaggaaaagaagctaattgaatgagaacaaggaagaatggtgagaaagttaaaaaaaaaaaaaaaaaaagaaccaggaggcatttagaggtgaattattgtttgtgagcatcaaaggcttcctggcaatcgtgctaaataaagactaaaggtgttctttggatttcgtaatcctaccatcagtaatttcaagggcctggtggcgtggatagtgtaaatcagtttgcaataggtagacaactgaatgggaagttaagacaaatacagaaccaccataaacttaggacaattttggctataaaggaaaggaacatgtaatgagaaaagagtcaagaggttttttttaatgatgaaattagagttaagtacatttatatggtaacaaaaaagacagggagaaattaaagatccataatgcaagggaaataattggtggatgaggtctgaacaaaatttaaaggaaataagacttggggtgtatataaagagattagccatgtataagagaagtgaatctttttatttgtgaaagaatgaagaggaaggaagttgataagagtaacaagagaaaaactgagggctaagagaaggaagtatgaccagtctgatagtctgaggatcaagggagaggctcagaaactgagtaaggataaaacataagggaagtgaaggcagcaagtgacagagctttttcacatgcaaatcccaggtttcttctccacctacattctgacataattctggcaacgtcagtgtaattgtaattgacccatcagcacccatccttgtcaaatcttgacttctttatccccagtaacttttataccctctccacctgagcaggcctaagctacatctcattggtctttgtaaacccaaactagctcagtgtgtgacatgaataacctctcaatatacagacataaataataaaatttatgaataaattaattaattttagtatcctattctctgaccttcgcgtacctttaatcaagcaatgaaagaataggggtatgtgaagatcagagaatgggatacggaagttcagcaatgcaaaatgtaggtgcttgcaagagttaactaggcgcatgttagagtcagttagaggggatgtgtaactattggagcaagggaggtcaaagcaaaggtcaacagatagaactactgtgttagaggtgctacctgtccagtgctgaaggtttctagcatgataataacatggaagcaacagtgaactaggtgtctaagactttgaaaaataaataagaaatcttgtgaatagatggaggtgataaagcatatgataaacatcataagtctgagaaacaggtgggtttccttgtctgaaaatttaagttttgaaagtagccatggggcactgggaggaggctgaccacagagtttaggagaatgaccagccaccgctgaatagggtgtctgaggcagtgattccagagggagcctagttcctgacaaagcaaggcggggaatggggatcatactaggaagagattccagtatttgtgtcagaggcatctgaacaagagcaactccatcttgaataggggctgggtaaaatgaggctgagacctactgggctgcattcccagatggttaagcattctaagtcacaggatgagataggaggttggcacaagatacaggtcatgaagaccttgctgataaaataggttgcagtaaagaagtcagccaacaggcacggtggctcacacctgtaatcccagcactttgggaggccaaggcgagcaaatcatgaagtcaagagattgagaccatcctggccaacatgatgaaaccccatctctactaaaaatacaaaaatcagctgggagtggtggcgtgcacctgtagtcccagctactcgggaggctgaggcaggagaatcacttgaacctgggaggcggaggtcgcaatgagccaagattgtgccactgcactgcagcctgggtgacagagtgagactcagtctcaaaaaaaaaaaaaaggaagccagccaaaccccaccaaaaccaagatggcaacaagagtcacctctggtcgtcctgactgctacactcccactagtatcatcacagcttacaaatgccatggaaacgtcaggaagttacactgtatagtttaaaaaggggaggcatgaataatctgcccccaccccttgttgagcatataatcaagaaataaccataaaaatgggcaaccagcagcgctcaggactgttctgtctgtgtggtagccattcttttattcttctactttcttaatgaacttgctttcactttactctgtggaatcgcctcaaattctttcttgcatgagatctctcttggggtctggatcaggaactctttctggtaacatttgaattccagcaaacatagtgaagtctgttgaaagaacaatccacaatgggaagcatcacaggtctacatggagatgaaggtatcagataaataataataatgactggaggaacttccctttcaggtggtgactaaagatggtggggtgagaggtatggcaaggttagctggcctggaagttctgaatgttcctcttgtaaatcaaaactaaaattctaaggaccctccaaccatctgaatggacttcctcctcagccagggctcttttaaaatttgacctgagagtctgtttcaggccatgttgggaaatggggttctcattgtacctctctggcattaacatgaacacagactttaagtctgataagaaacattttataacctattctctctgaagcctactactacctgaaggcttcctctgcaaataagaacttgggtccccacaatcctttatcttaatgtaggcattcctttctgctgatcccaggtctttagacaaactcaaacaattgtcagccagaaaatgtttaaatgtacctatagcctggaagccctccaatttgagttgtcctgtttttctagaccaaactcatgtatttctcaaatgtatttaattgatgtttcatgcctccctaaaatgtgtaaaaccaagctgcaccccgaccaccctgggcacatgttctcaggacctcctgagggctgtgtcatgggccatggtcactcatatgtggctcagaataaatctcttcaaatattttacagagtttcactctttttgtcgacactctgatatattaatagaattgtttttgctgctccaggcagattccacagcgagcttcagcagtagctggatctggatggttctagtgactggcatttagtcaccaactaaggctgtgacttagattcaaagtagaatcccatcaggaagttatgttacttcttgaaaattccttctttgagttttttgaagaggaagtaaaaagccaacacagcataaacacagatttcatcaaatactgttaaattatatgaatgaatcctcttacacactatttttacagagcaggttccagaatttgaaaacatttttctacttagagcaacgcttgtgccagctacttgctaatacctttctaaattaatttgtatttttggttaaggtttataccagttagttggacatatgagatgtttcaatagtataattaccataaatgactttttctttttttttttttttttttttttgagacagagtcttgctctgtcacccaggctggagtgcagtggtttgatctcagctcactgcaagctccgcctcccagattcatgccattctcctgcctcagcctcccgagtaactgggactacaggcaccctccaccacgcccagctaattttttgtatttttagtagagacggggttttaccgtgttagccaggatgctctcgatctcctgacctcgtgatccccccgtctcggcctcccaaagtgctgggattacaggcttgagccacagcgcccggccaaatgactttgttaaaatttttcagtaagtaaacatcattttaatttttaacaattaatattgtaaatatttaatatttaaaaatttcttttattgaaaaataccaaaaagtgggtttatgattaaaaaatataactctaattaatcaatgatgtttggcattatttttaatcttgtaaattcaagtaattctgaaaatcaaaaataattaggtaaaatgttaggaaggtaataaaaatatatgaaaagtagttaattcaagtggaaaactttcattatgtttaaaatgatcacttccagtgttttaagcagaagttaggtttttggtttatattatgaatgtacgactttatgaacatatgtaacatatctgtagatagtttgaagcagtctcacactcaatcccaacaaattaaaacagatgacatagtctccttaatatgctcggtagtgcacataagagaaaacctttggcaaaaggtagttggagtcacccaaagatattctgaaacacctgggtgggacagctgcttccctctggctttgggccttccacaaaaagtcaattatctattaagtcatctgcgttcatttcccaggttaatcaggaaaccatgatcgcccgagggatggcttgcatcatgcacaccaggaagtttgaactgtagccaaccatgcaattaagatgttccagtatagctattattcttggttgaggcaaattccactggcacaggtatttactaggaggaatataccaaattaaaagttaaagaaagaggaaagaaacacgaaacgtggctggcggttaaagacaggttttccttaattaaaacctgagaggcactcctggccgatttcagtcaggagcgctttctctgacagactaagagcatatattggtttaagggcgaggagccttatcagaagtttggaatgttcctgtttgagggagaagttttctggcggggttggaatgtctctgggaggaggcgagcttaccttggggcagccatctttccgccagagcaaagttatcttgagactggcatcttccttgcccgatgcgggttatcttggggctccatgcctctgatccggaaggagtttggaatctttctggttggagatgttatttgtggtttatggtcgtgctgatcttagccattgggctgatgccctttggattcagacgttttttattaaggtgaactttagaatgaggggcttgtccaagatggcgatgctcctgctctgtcaccaaatagttcagatttttactcacagttaacgtttctatagttcatgttttaatttatggtgttttcatcaaatggtttatgttttagttcatgatttttctcagtgttgtgaactcagaaaatgaggtgaagataaaggaaagttcctgtttgttcttcacaactattatttttatgaaatttgagcgctaagggaaacaatttatctttgtgtttattacagttgttccatatttatctagtctaattcccgtcatatttaggctataaaaaagatttgcttacattgtcacttcagtaactcaataatgttttactgaggaaatctccaatttccaccctgaaaaactgcgtgaaaaataatgaaatcacaagaaagttaaaaaacacctaaaaatagactgtggcaatgaagagtatctctaatgcaaaacttcatctgcctgaattaaggagttcttccccgagggtgcagccccagaaggggctcctggccaaggctcacagaggcattcgttggagccccttcacagattttctgtggtagtgagtgtgattggaattgtttatcaattgaaacgctattaagattagggttgtgctccttaataaccaaacctttcaatcatattgattttgttatgctgttttaaaactacacaggtaactaaaattaaaagaattatacctctcaaagcaagtgaaattttaaaatgtgttatatatttatgaagagaaaataaatatgcaggtttttttcagttgtagatagcgccaatgcatttggctataactttcataactacatacaatgaaatagtaagtggaaaaaatcatgaaggagaaaaggataagagattacggtggaccgaaattgcttttgactgccatgtgtgctttataacttttgattatttgcttcctgtgtgtcaactcttggaagtatacatggatcaaggcaagtcaccaaaattttttcccatttccttgggtatagtcactggttcaaagataggcaacttaatcaaaacaggccaatgcattccaatattttgaacttcaggtgatgtggaccttccctctggaactatagtgttagctagataaaaatttgggaccatattgaaaagacttgtgtgcaactagaagcaagcagagatgtgccaaaatgagagtagcacgaagtgtccagaagcctggaggaccagctgaatctttgaggccctggttcatggtagctcttccttgagttctatcagcttttccaaagctttcccagctatggaagccaaggaagtagagctagaacacaaaaaacagatgtggcagatttcttacacatattcatatatttgagtaatatcatcaatgaaataatggaagagtgttatctaaaacaaaaattctcctgaggtgtccattgctagcccacttaattaaattaaaatattgatcattgattcaatacaatcacagaatcgtaaggctggtgggacattcctttgacaactgaaatattattgcaggccctcatggaagatgtccagtaagagtcagtgagcatctgcttactctgttttagtggcatggaactcacaatttcacaaggcagaatattttagtgttttcagatacatcatacatttttttcttatattgagctgaaacatgcagctttgtaatttgatgctaacactattcctggagtaaaaagaatgaggagtctctttcttctggcagacaaaaactttgaaatatttggaagtattctcatattttcttcacataatcacttgtccaggataaacatttccaattgttctaaagatttcttaaatacacagactccagaactggatttaaggtatctcctttgggtaaaatctgccacagacaattgaattattcatttccaattcctagctccagcgatgctgaaaaacttgcacatttgagtatataaaaacttgattaagtgaatggaaaaaatatcattttttttttttagacagaacctcgctttgttgcccagaccggagtgcagtgacgtgatcatggcttactgcagcctcaaactcccaggctcaagggatcctcccaggctcaaggatccctcctgtgagtctctgggaccacaggtgtgcaccactgtgcctggataattttaaaatttttttggtgtagagacaggaacttactatgttgcccaagctggtcttgaactcctgggctcaagtgatcctcccaccttggcctcccaacgtgttgagattacaggcatgagccactgcacccaactaatagttacgttttctgactatataattaatatagactcattggagaaagtttggaaaatcaaaagaagcatctaaaaaggacttgaaatggacagtgctagtcaaataaatatgatttagccaccttacaacttataaaacctttataaccttaacattatcaaaggaaatgctcgaacgttatagctcagcctgctgctctaatgaggaattatagctcagcacaatcctccactatctccaaaatctctttatcacagctacagacatatgaccaacagttctaccataagcttcaccatcaattctttatttcttatttttctttttatcatttaattgctactttacttacttcttttgtcctttataaatattgtactgtgtatacaagtctagattacttttatggatactgagtttcagatatgcaatataccaactaaatcagactggatacttgtgttagttatctgcagcaaatttccccaaaacttagctagcttaaagcaaagaacatttatttctcattcaatttctgtggctcaggaatctgggagcagcttggctgagtggttctggttcaggtctctctggaggtgcagccatgctgtgtcaggtaggactgcagtcttattgcaagcctccactgttgctagagaaagcctttccaagctccctcatgtggctattgtcagatctcagttcctcaatggctatgggcccagggaggcttactttctgaccacttgggcatctgcttacaaaatggcaatttgtttctcccaaaatggccaagatggaaggcaagagcttttataatctacctatgaagtgacatttcatcacttctgtcactattggtcacacaggccaagtctggaaccatgtggaagaggactgctgaagagtgtgaagacccagaggcagagatcactgggggccatcttgaatgctggctactccaatactaaacgaaacaatgatgttcttttttgtatttttttctgtttgattttttttctttttgtagagacacagtcttgttatgttgcctacgctggtctcaaactcctggcgtcaagagattctcccacctcagcctcccaaagtgttgggattacaggcatgaaccaccaaacccagccacaatgatgcttttagctatgctagaagaccaaaaactcatttaaatttattgttctgttatgaaagttagatattaataagtatctcttctgtgatttgaacaataaaagggtcctcctccacacaaaacataatttgttgtcaaaaacataatttgaaaactgacaaataacattagttaacattaaaatattaatttcaaaaacaaaatacattaaaatgtcactatagttcaccaaaaagacatgtgtttctacttattaaatactttcataaccatttatatggtgataatgctctgaaaataacattttatttcttgaatttgacaataattaaaagtaagcaatgcaaaggctgaatctgcaaaaatgcatttttgagcctagattttattatattagtctatagtagaaattaatttattttgttgatctctttaaatatgaggctgatatttactgagtgcctaataagtacttgctctgttaggcaactcacaatgggtacattttctttcatccccaccatgcacaatagaagccaggccagtgaccataaggatacagtgttaggacacactgcttcatcatccagagggcagagaggactcaggcttactttgttaacccataggcaggacttttgtcccctgtcccaattcgttatgattgacagttcatagcctctgacttgatcagttttatgtataaaaaatcttattattcatcattttcttaattccatttaaaataattttgtatctttatggtacaggttgttattttgctggttgcattaatattcaatagaatattacttagttacctataataggataatggtattacataagatctccacagcctagttggagagaaagaagcaaatagcagcatatggtcagtactatttgttaattcaactgatatattttgaggccctactatttgccaagcatcatgctgggctttagaaccagagggctgaaaatggtgaagagtccttgtcttcaatgaacttgcattccagagatcagcagagacccttaacgaaaaactagatccatctacattacaggcagtgcaaagagggatataaacagtgtattaggatacacaataatcagagaaggccattgtagaaggggtaatccttaaaggcatttctgatcaggtcacaccctaaagggtgaatatgagtctgccttgagtagagctagaaaaagacattccaggcagagaatcaccacgataaagttggtgtattcaaaaaacagaagggaggctagtagagttaagtgcaatggacaaagagaagaactaggagagatgagattggagaaataggtggagaatagatgagtgagatagtacacatgagaatgttaacacagtaacattttcatttttaaaaagaaaaaagaaaagaatctcatcgcttatgctatgggtaggaggatccagaatgaaagctgtgagaccagaactattataaagtcgcgtatattattcaggaacataatggaatgaaattcttaactcatcatcgatagtctggggagtatcagggaggacatgtctgtgttaaacactgagggatcagccttgctgagaagagtggggatggcagagggagcagccagcacaaagggctgaaagtaggaagtattgaggcaaatttcaagaactgcgagtaagtcatcatggctttaagttcgaggtgtatttcagaataccaagaaataacacggaaaatttagatgagggtgagctcataaacagatctggatgctgatctatggaacgcaaactttaaaaaggatggaaatccagtgtagggacataatcagagttcagtcttggaaaatgattgtgattaaaataagcatagtgaattgcaaggtatcaagactacagaggaaagaaaaatactagaaggctctctcattcatccagttagatagaagatgaagatctggccacaaaaacaggagatgagttccagagttattcaggaagaactgacaggagtgtaagctccttagaatgtgagcttcataaagacaaagactgttgatgttttattcactactttatctccatagctagaagagtgcctggcacttaaaagaagcttagtaaaatatttgtggaatgcatctatgaatggatgagttggtgacaaattagggaggctacatttttattctttaaataaatatgtattaatcactgactatgtgtcaagaaatgttccaggcactggaaatacagtgttgaaaagatacacatgtccatcagtctatatctatctatctatctatctatctatctatctatctatctatctattatctatctatctatctaatctatctatctatctatctgtctatctctatcctatcttctatcacccatccatccatccatctgtccgtccattcatccatccatgtatctatttatccatccacacttctgttccctttctacatatcattttatttatctatctttttgtaaaacagtcattatttaaaaccgaaactatttcttacagacactgaagagagaagatagaaggaatctttggaaatgcaaattgaaacctacaactgaaaaatagagtcttagtttatttgtgtaacaaaatccatgggaaattagaaggtatcctggacattgaaaacctcacagatcacatgagaagcagagtgaaggagaatataaaaaattggatgcaaaaaagaaaagcaccttgtgagaaatttctgctgttcaggtgtttgaagagcttttacaatcaggaatagctaatatttgatttttaagtttagttttttttgcattttttgtacctaagccctctttgaaaacctctagatagaagctgctatatgtagatttctttgtgagagattgggattgtaatccacatgtaaattagcaggatacacacacaagagagtgaaccacaagaagtgaaatctaacatccagacttaacagtgactaataaaaaaaattccaaatttgcaaatatcttgtggagagtgatggaatttccaaacaaacaacaaacaaaaccagaaacacacctatgttaggatttttttctaactgtagttaattctcaccagacaaattaatttcagctaatatttacattacatattttagtttttcctctagctaaatgattatatcttctggaatgtaagacactgcatgcatttatatgtatgtgtaatgggtatcagtgatgagttcaagagattgacatgaagaagagagggaggttctttgtccagtaggttctagtggctcttaataaaaacatagactcgtactggcttccaaaatgcagatacaaccacaactctgcagcaggcaaggctgcaccaaaccagccaagattcaaggatccagtcctatccagacataatccagggataattgctttcacgtttctttcccaaagtcttgcacttttataccactcccttaaattaaactcctattgtaaaccataataactccagtagagctgacgcaatagcagtctttatgggcagacacctgcaaacatccatttaaagttgcttttttagctgccataagtacttgttgaagacatttggaagtgtagttttgcacttgagatggtgttgaaaatacaatagcaaatctgccaaaagcaagaagaggcaataataaggctggttcaaaagagctccctgaaattctgagtggatcattagactaattgagtggatattggactaatgcctttgacaacacctacaagacctactccgtttgcttacagataattacaaagtgagggagaaaacaggcgtatccatcccattgcctttggcaagtcttcctcaaactataaggtatgcgtaagattactctagagcgtgtgtaggttacaggatgctgggcccctccccagatgatctaattgaataaatccaggatggggcacagagatatgcatttcaacaagtattccaggttgtttctgatacagtcgttatagggaaacaatagcagtcagtaagatttaagaaatctacagggtaaatgtatttttttcccaaaacacttcctttattagcccacagatgcttgaaaattcttcaaggttggacagatcctatcaactcttaattagagatgaaggaccatccagtaatttccagatctaatgagatataaatgtcttaggggttgtgaagaatgtgtgtgctctaaaagtaaagaggctgcctttgttaataattggcactaaaatccctgaaaccataatgactagaatacgggaagaaaagggttgtcttttctctacaccattgccaacacttgttagctttcatcttttttataatggccattctaacaggtgtgaggtgtatctcattgtgtttttaatttgcgtttttctgatgattagtgatgttgagcatcttttcatgtctgtgttggccatttgtatgtcttctttggaaaagtttattcggatcctttgtcattttttgatttgttttctctgctattgagttgtatgagtttcttataatatttggcatattcattgcttatcagatatagtttgcaaatattttctcctgttccattggttgccttttctttgtgttgatggtttcgcttgttgtgtagaagtattttggtttgacatagttctagcagttttaagatttctcacatctaatccagttccttgaatagtgtgtgttcatcaagtacttgttaacatattgatggctttgaagagtttactaatcaatgatgaagacctgataccctttcaaagatttaaatgtcagagacaagaaaatgtaatatgggcgtaaaataataaagttgattgaaatgctacagaacgctttctcacaattgtaaaaatatgactgttgtgcaaattccttgatagatcacaaaacaaagaactctacaccttagttttcaaagtccttcatgttctgaacacttaacttttccaaacatatctcagattgctcccgatttgtatgcctgagttctaattcacatgtcaatggacacatctagaggatttccatattgatagctgtacttgtgctgtcttctcaaaccttctttcacttatttttacccctgggaatcccattcttcctcaaggtcagtctcatgtcccctccagatgctttacctgctcacactcctaatacgtggattaggagtatctctcctccccctcccttctaaagcaccctgatctcctgatggcagttatcggaatttgcattgtattgctttgtttctttgatttatttagtttacattttttttttgcagtgatttctctgtggtgtgggaagtcttacagttctcattatacataagcaagaaatatttattatgtaagttattgatataacaaaaatgaataatttcaattttgatctaagttatttatgaattcataaagtttatattacttaatgttcttggtgatggggtcctcgttcataaaccaaagatggcaacatctgctctgcaggattggtacaaagatgaactgaggccatttatgcaaggcactggcatacacttaaaatatcagaaacatccttgtagatgcaaaaaatacagaagatagaaaacaaaaaatattacattgatattgatatatagatagtaatactaagggatgactgaaataaagtcaatttgaaaaagttttaaacaacatttataatatttgctcagaattttatgaggcagtaatttggtttggggtcagctaggatggcctctctctgctccaaacagtttgacagggctcactcacatatcagggacctcacgtgggattgctggaatgattgacatggtgtattagtccattctcacactgctataaggacatatccgagactgggtaatttataaagaaaaagtttaatggactcagttccacatggctggagaggcctcacaatcatggcagaaggtgaagaaagagcaaaggtacgtgatacacggtggcaggcaagagagcatgttcaggggaactactctgtaaaatcacaagatttcatgagaactcactcactgtcacaagaacagcatggaggtaaccacccccatgattcaattacctctcaccaggtccctctcatgacacgtggaggtcacgggaactacaatttaagatgagatttgggtggggacacagccaaaccatatcaggcagcttaaaagaatgggtctctctttacctgacctcttatcctccatcagcatagtctggattaataacatggcaggagcattacaagttagaaagtttcctttgcactctgttggctacagaaagccatgaggccagccttgattctaggtctggagcagtagactccacctcttgttttttttttttttttttttttgagacggagtctcgctctgtcgcccaggccggactgcggactgcagtggcgcaatctcggctcactgcaagctccgtagactccacctcttgatggaagaagctgcaaatgattagtagctaattgtagtctatcaaaatagaggagatagggtgatggagggtggcttggagaaggcagggcttaggaaagcaatgaagccaccaaaagtatgcttcagatttcaggtaaacatgtgtgattgatgggacatgagaaaacttgagtacagttgtgtatacacgaagtagttatgtatcattgtaaagagagagttgaagaagaaaaagtaagagagatgaaagataattgaaagtatatcaaaaagcctgtgagctctaataaaggaagtgaaatgataataaccacagctggaggtgagaatccatgcttctgtctatgaaacatggaagagagggattcacaagatgagaagaggggaaagaggtctgtctcagtaagccaggcaattagccattgggttaaagtttgtgagtgtaaataggaaagggataggtgttcagtaatgttttagagcataatgagcaagaatagagaaggtaagaaccatagcaggaggcatctaaagagatgttaggtgaacacatgatttatcatccaaaattggatttttgagagaaaaagagtgctattaattattgctccaggaaaacaggagctaagccagtatctacatacagttatctgtgtcttagaagaccaaatgaattgtgacacttacaaaggtaaagaaaaattggtaaaattttaagcttagaaaaacataatgaatatgacttttgctaaagtttaaggccaaaagggcacccaagtgaaatgctctgtgggtagagaaatcaagagaactataaagagcttacaacctggattgctgggagataataatagtaattatattttacatttacataatgccttatgattaaaatactttcacaggcactgcctcattttatccttacagtagcccttccaggtagagagactggttactatcctccttatatggggagaaagagtgctacatagaagacagcacgctctttcaagatgcctcattatggctggcaggtgcagtgaccttgctgtgtatccctggaaaggttatataacctctttgagcatcaggtttttcttaacacataaaagaagggtaataatgagaattaaataatctctctctatatatgtatagtttatttatatgaaatttaacttatgtatatatacacacaatgtatatgtctagttacaagcatgtattgtatattggaaaagtttatccctttccacactctgtagatgagaaagctgaagttaagttttgttgaaagagccacataatgaactcaaatctcccagtccaggactctttgtgctaagccatttgccgattactggcagttgaaataacaggaatgaatgagttctcaaaggaagtaagcatatatgtgatctagggaaggaataaaaaaaaatacgtctcccaacatcctaaagaaaagaattctcaataataatttaaggaaaaaaattaagaaaggttcgaaaaacagttacaagtttattgaaacaaatattgacaatcttaatgaatctgacttttttagagaagtaaaaatggaggacatttcaggagatgcagaatgcaatataaatggcagctcaaagctggaaggcaataggtctgagttcaagttgaggttgatggactagagaagaggagtaatcactgacgcaagagaaggtgagtgaaaagctgaagggcaggtctttcctgagattggctgatttcagtctggataatgtccaatgaatgtagtgaggtctagattgaggtggggaggagttagccagacaggcttaactgctcttggcctcagtttactccatgatccttttcagtctcacaattgtatgattctgaccaagttgtcagttctagggaagagggaatggaaaaagggctttatacgtggcagttttgtctccaatgcttctgacaatattcattaccagttaaataccagtgttctaagaattattttccgtatggtgaacctgaatgtcctttttttccctctgtactcactgaaatcctctctttctatcactgcagtctctcctctctcccttttttgtttgtttgccctgttttctggttgtaccctctatttatacttttaattctcccttattatatgccatctatttgtattctgagaatctgtttgacaaatttctttccagaaaacccatacccacaattaacctagttattcagtgtgtatgggggtatttattccctaagaaaagcattctttgtccctcaagcagcgcaaccatgataaaatgtcagatacatctttatggtagtaggagtgttagccattttgctatagtcatgtccatttcataatttactttttacttaatattttgctagtcacttttactagccaattccaagctttactaattgtaatctgaattcagaccaaaagatattttttgtatcagattttgtcctcaacactttcttaacgggcagtgtttgtccattagctattttcttggaaataatcctgctaaaaggatactaaaaacacaaaactgcttagacccagttaggaattgaacttctgattttccccagataaggtgcttcatattatggtttacttattactttctttcttcattgattcatctgtcattcattttctcagcaaacagttgccatctcctatgtgtagtgttttgacatgcaattactaaacattttttaaacactgaacttaatttttgtttcaagcctacatgttagatacacttcatcttactctctgagaatgcaaaattttcccagggttgaatctaagttctgtgggcccgtgtcaaaccaagtcattgatttgatatttaaaatcttcagttgttcaccttggattctgctgagaagcccctatttcaggatgattttcagttgtatctgtcaaataaaaccaggaaaaccaaaattcttctagatattaaaattagtggaatttaatagagggatttgcttacacaggttacagggagagttatgaaaccgaggagaggactatggaacttcccgtatactaacaacagcagaaagctgcaacttcccagatgatgaaggaaaagggagtattgccagacccaggaatggggttcacttggcaaaaggcagaacctgggcttcagttgggcccttctgatagagctggagggtggagtgagggaaagtttatagtcctctctgcctctgtcctccaatctctcacctagcaggtggcagctgaacacaggatcttgggaaaaccagcctcagtagcccatctagtatacttgactcttggagcaaatataccactcctctgtaagagaagattttttccagaataagcttcaagttaacatgtttttattatctatactttaataaacatttttatagacattactctgaagaaattccggtgcattcatacaggttagaaccacttgagctagctagcatataatctatgcctcccatttcagtagcacagaaattgcaaagacatggaaacagaacagaactctgtcattttatcatgacttgagggttttatttgttttttaaaaaattaaaacagtaaaacagtatggctggagaaaaattatttgaaaatcatgccttgctgaattggaatctgggagaaaactctttaactttggcaacagacccatgaagccaagtccatgtgtgtcagggcgcatggtagtgtagatggcatcttctgtctattcatttgtagcatagatgacatctctttatctatcatctatgtgtctatctaatcctctattatctatcaatcactatcattatctttcatctatcaatcaatccatcaactgtctaaatattatctatttatcatatatctgtcatctgtctattaattgtttgtctctctgtgtacctactatctatttatctacctatctgcctatccatctatcttagtttgctagggctcccatatcacaaactgtgtggcttaaagcaacagaaatttatagtctcaccgggctggaggttagaattctgagatccaggtgtccgcagggttagttccttctgaaggttgtgagggaagaagctgttccaggcctctttctctagcctacagatgacgatcttctccctatgtgtctccacatcaccttttctctgtacctgtctatgtccaaatttcctcatgtttttataagaacaccagtcatatctaatatcgtaccttaataattttattttaacctaattacctctataaagaccctatctccaaacacagttgcattttcatttatgcagaggtgagatctttaacatataaatggggggaaggcacagttaagcccataacactacctacctctctgaagagtaatcacaatgattgttcagaacttacatcaagaaattacatttttttgtttgttttgatgtggtgttttatcactaacattaattagaaaggtaagcatgtgaagataataaagaacagaccaatatttagtaggttttattattgcttttctattatttacagagagagccccctcctattgcctgtacctggggaggactactcttaccacaagctcttggcacacactgcccagccgtgagcatcaacctccacaggatacagattagacagaggagtgaaggagcggatctgaaggcatgcagacatggatgggccagctgcttgtccatgtgcatgactgctgtgtctcatctagtcccagccactagacctttttgggtctggcatgctctgtgcccctctcggatgggtaggaaatgttcttctgctcccatggcattccagctgcggggaacgtggcaagattatcttttaggctgtcagactaaatacttcacagagatgtcacttatcctccagcactgtgaggtcacagggaatactttgttgacatcctcagctccacctgagttaggacacagatcatttctgcccttggattctcgaacccatctgagagtttattattcccctgggccccagtccccaggaactggactagggagtggccaccaggctactcccagggacacactgatatctagaccctctaaactctgctccttattattataccttcatccaaggaaatcattttatactcttaatcttaaagataaccatgttattcttggcccatgatctcctaagaatctgggctttttatacttaaagccaataactttctttacatttctgaattccttagtttcatctcttctctgggggaagaggggttgcatagcagttaaaccctcaaaccattgctctgtatgtatactgttttttgatcattcctcaagttattattaaataacaacttagtcctgttgttgaattcttgatttctgcatgttaactatgtgactttggccaagtgagataaccttgtatgtctcaattcttttacttggcatgttttggtaacgatatctacactctctacagcacatggtggttacaaagatcaaaacagtttaacaaaatgcttttaaatatagcaagattttttacaaatgaaaaagattattggtgtgcatttaattaaatttgtaaactgcaggagtattactctcttaaaacatcttcaaccatgtgtgattaaataatattttgtgatgttaactatttttctattttctgatgtcaactatttttctcttcttatattctccctttttccctggtccgcattccagaaggtgattagcaaagaatttcactgagtatgtagaaaaacggaagacaaaagtacccttgaagagttttagcctatgcatttgcttctgaaaacctctatgaaattgcacaaggtttttgacagtggggaaggagaagaagggttacagaggcgacattagaaacattttattgggaagtagccattttctctaccactgcttgtggatagctggtaaccaggtcagcaggtaaggttcctggctatgactctggataatggtaccatagatcatctcaacaccagctatattggtattttccaaagttccccaagcaattctaatatacagccagggttgaaatctaccggttcaagcagcccagaacaagagtctcaaaaaaaaaggccaagtatggcagaattgacggagctaagaagcctacaaagactctgtgggcagataaaatagacaacttctcggatacctgcagttactgatgaccatggactgaccccggaaaccaccatggaacactgcttagccctgcataagatcctaacaactgtataatatgtggggaagtactcaagaagttgaacttcagttaaattttagaaaataaagataaatttcatgcacgccggggtttgtagtaagaaatgtgcattcttaatgcatctttaaattcctggaaaattagtaaaatttatttttggtgtaattggaaaaatactgcagcagagtggagcagggaaaaataatctttccaaagctacacattgattaatggaaggccaagcaacaaaaaacttagttcctgaaatgttaacacatattcaatagctaatattatcttatgattgcaccaagtgttatacctttttactctttgatcctctggctagcagaataacatacttccccatttaggctgaggaatccattcttgtaaagctaattacttctaggtgagctaaaaggtaagaaaaatgattctatgacaacttatttgtctgtaaaagaaaaatgactcttttccaacatacccaatattaggcctttctgaatcaagtctgattaaaaaaatcaatcttaggaaaaattcaccttaatcactatttttcttatttttattgctaatctttgaagatatttacacttgtgtgatcttatcatttaatattaccagtgttttaaatacagttttatattaccaggggcttcacctactgacgtcttgctggtggtttgtagaacggagtgaaggttggatattcacatccaggcttgagatagccctgatttaatgtttcagagttactaagtgatcttgtgaggacagaaatttattctaattgaccctacagctaaatatatcaacatcattgtaatctattttattttattaccataaggatgaagatgcaataaatttttggtgagcaaattcaagcttctcattgcaattatatactcaaaattaaatacatttttattacaaaataagcacaatatttgaagagttaaaactgaacatgtaagcactgattgattcacaagatctaaaagctattcagaagcaacccataggggtgatcttgcctcataaacactccccactcactctcaccccacatgacccaccacacttttaaccctgatattgatatgggaaatgaagaactgagaaaatcatgtgtgtaattcaagcaaaacaaaaaaaccttcaccatacctatttgtttagtagagaatacaaaaaaggtatttatcttagcctgactaattgtctgaatcattaccttgattcttcgaattgcttagcatgtttatacctgtgcaatgactaaagaataaaacaaagaaaagaaaccattcccttcaatgcccaaactgcaattttctatttgggaccatataacctctagataagaattgagtgttaatagcctcccattgatgtgtcttatcaagatagatgcttctgtttgcttgacgtgcagatggtaggctatgaaaaatgttagttttcatttataaattattttcctttaaacagtaattctaggcaagtttaactgtataaattagagaccttaaaatctgtcttcttaattgtcctaagagaaatcagagctctcttttcactaaagtgtctaatttttattgtgtgagttcctaaaggaacaaagcctttcattagatggacattttcgtctaattcaactaacgattattgtttgatatctacaattttccatgataatctttttaaaaaggtcaccatttagttgttagtatgtagtacaagaaacaatgtagaggaaaaataataggttacattttagaataggtatatgttttattgttatagaatatcaatttcaactttagattcttatcagataatacatgatggtcaaaaagtaataagtagtccatcattgtacacttgctaatgattatgggtatacttgaatttagaatatgaaaattggagcagcgattgggtccaacaatagtcaatgcatttaatacacctgaagtcagaatgtccaagtaagtcattttcattcctaccaccagtaacaaattgaaactttcgtatcaatgtaaatctagacataaagcaagttctcctgcctcacatacttacagtttctagcaggactttataaaaaacattgaccatagtccatacttggagccaaaaggaggcattagacataactggtggaggtcttactaagcattgtcgtatttcttcgcttatctgtgtgtggcacacggtagccaggcactggatatctgtacccttgcttctttctgttgcagcagcaaaatccacaaagcagaccccctccaatgaagaggacagcagcgcttgcccagccaaggaaaagtgctgctcccagctctcgtttctgacctatgtggatggctgggttgtagaaatctctgatgattatattggctgtccagctcaccggaatcagaacgaagatgcccgtcaggatgaagaggactcctgaagttcccagaaggtatgctttggccctctcgttagagcctgtgcactggacctgcttcatgccacagatgccaataagcagggcgatcaaggagagagcaacagccacacacatgagggcccgggctgtttccagggcaggcgggagagccaacaaggagctatagaacttgcattgcaaccggaccctggcttgtcggatgcaattcatccagagcccttcccagagcctctcaaagacaataatgttgctgccaacaaaagctgatactctccactgaggcagaagggttgtggcaagagtccccaccatgccaaggaacccaagaaccagcccagcaatttgcaagggataaaatgccattgcctttactttgaagactggttcaattcggagtggtagaagatgctcaagatgtagaacgtggaagccttttgagtctagagaagtctttgatgatgttctccttggctgctgcccataacgttttagtccaaatcagtagctgtgactgaacttggcctaactagaagtacctgttgtaaatgcatgttgccttttttcatacacattcatttcagtatggattatttactagtcatatataattgtttcccagccaataagaaggtagctaggggtgtgtcaagaaatactgcattcaagtttaggatttctcatattattattgccttagcaatgctgtaattaagtgtcaaagtttctattgtggattgctaattacagagctgaaacttcctgtgtaaaaatcactctgatataaaagtataaatacatgtgtcaagacacagctgaagacaatgccaaaatgttgtaagtttattggggagtaattaaaaaacattttggactttattactttattctagtgtaagtaagccacttttccttaagatggtaatcaattctggctttaataaagatgcctcaatagggagaaatatttaggtattagtttcaagacacacgaaaactgttgatacttagcaggagccctaagcaagaaattaacatttcatagtttattcttaagatccagaaaagaagaaaatagagaagtactccttataattaatttgaatgaactgttaattattacattagctgttaaggaacacctctctctctattgaagtaatgtttaatatggaaactttcattcaatgtttcttcaatggcagcttgaaatagatcacatttattaaagccaaacacatacctttcatttttatggaacaatataaaagtggcccttgaaataagctatgcagtcacttaaaatttagacgctagagaacaatttagtgctggaagtttatcttcaaggccatcaaacttaagacccttatttgccagatgaacgggaggtgtgcaaagtgtttgactgagacaagccatgtggtaactgatccaggaacaagcccagccctgtaactcactatgcttacctcctctgtctggtccgattcaaaaataggaaggaaagatgctttttcgaatcttttcatataagtgggactaaacccagtagaaatttaacactatcctttctatagtttttcaaatggttttcaaaggaagaaaaattcaactgagattatttcaaaattcgagtcaagttgtagcttttgactgccgctttcttgccactccctagaggcagtggggggcttcatgtgggagaagtggacccttttcctttttcttttacatcccactggcaagggatctattctaaggatgaaaatgtctccaaagcaagcacgccaaccacactccaggtgggaggcattacaatttgcaaaatgtcctccatttcagtcaattaccggccaaagatttaatggctggtccaatgacatccagatttaaagagtccactcactgaattaatgaatgtgaaaatcactgagttttcaaaatgattggtctgagaactccctctctaaggaatgtgaatcattgagcaaacagatgacttctgtgtcgttaacagtttcccaacaccggattggatgaagggtttctttggccctttgttcatggttactgagacataggcttaaccattccctccctgacaggattttccagcattactctgatttgttacttctgggtcctcttccttgttctagttcctcttcctcattctacttcagttttattcctatgttcattttgtcctggaagtttccagtgtttttttccaattatttgctttctcatcagctagagcatattatctgtattataagtgagaacacatgtttgtttaagatatggagatacctcctaaatataaaaataatctgaggctgggtacagtggttcacatctataatcccaacactctgagaggctgaggcaggaggattttttgagcccaggaatttgagaccagcctaggcaaatagtgacaccatgtttctacaaaaaactaaaaattagctggatgtggtggcaaacgcctgcaatcccagctactcggaaggctgaggtgggaggatcgcttgagcctgggagatcaaaactgcagtgagatgtgattgctttactgcactccagtctgggcaacagagtgagaccgtattcccaacccccaagaaatgaataacttgaaaaacataaataacgtaggagatcttggtctttgcctctcaccgacaaaaccaattgttaaaaacattttaaccttctctcctttgtatttaggggaagatactgctttcctctccaacctttctatgaatcttatccccttctacctcatcagtgggacttgctctattgatcattccctcctttcattgtactgacaccttctccctctctctgaggtgtcccttagaaaataaacatactcaattttcttctgttttaaaactccatcttggtacatatacatcatggagtactatgcagccatatacaataattacatcctgtcatttacagcaacatggatgcagctggaggccattatcctaagtgaattaatacaggaacagaaaaccaaatttcacatgttctcatttgtaagtgggagctaaacatcaggtacatgtagagataaagatgacaacaacagacactggggactgctagagagggaagggaagaggcagaaaagggttgaaaagccaacgattgggtactatgcgcactgtctgggtgatgggatcattcacacccagatctcagcatcagtaaacgacttacacatgtgccacctccacctccagggttcaaatgattctcctgcctcagcctccctggtagctgggactacaggtgtgtgccatctgtaaaataaaagttgaagttataaaaatgtaagagaaatgaataaaaataataaaataaaataaaatgaaatttcatcttgccagatctgtattccttgccatgtatctctacacatcttttggtcctctctcacatttcccactgctatacacattgaaatctgcctttggtcatcatgctacccacaaacaccttcctaaaaatgttatagacttcttggacatcctagctactatctttaccaaaacgcttccatatttctgcttattgatatttcggtaaaggtcacaacaaaccactgtcttctaatgagagacagtgaagggcatgtgctctggagagagatttggttctgtcttggcttgatgccttagccacccatctcaggcatgtttctgaatccccccaaaagtgcctgttctacaaaatcaggataataataacatcaaattcacagggctgccttgaagattaaatagaatgtgtgcaaagaacctggtcctgagcaaacacccaggaaaagttttctgttaatatttgtctcatttgtttttgttgtattatggtccttattacttctccacatacgcattctcacttttcttccagacttcctgatatacctcagtattcttctcacttggcacactctccctaaggcacctcacctatgtcttcacagcattacctacctcctgtcaggccgtaagttctgaatctgttgtctttagtccatgcctgtttctgtttgccaccctcagctcatttttctctcttattctttaataaatatgtgcctagagtggacactgtgatgttccacccagatgtctttttcagctgcttagagtgctgtgggcagaacaccctcagctctcagcctcattcaggtattacctggaaataggcatgtcactcaaattattccccattcatagatgtagcccatatccagtgactcatcaatatggtcctgaccgctagccctgttagccccatggggttaacactcaggggctattctagctccacagctcactgtatggtcagataaggccttcattagccctgtatcccaactaaactccatatggccaatcctcttccttaccttcttttcctaaggtgttgatctcataataaacataatgcacactaatctctgcctcagagtctcatgctcagggaacccaaccattgactgacaccttattcaaatggattaaatatgatttctgttctatgctgtgtcttagttcagccctttgacattcctcatctgtaccatttcaagaatgtcttacctaacctccttgcctctgccctttcttactactttctgattcattttctattgaagaaccacaaaaccttgtggaatcaaactctgtacatgccaccaccttacttaaaatttttcattatttctctgttgcctgtaaaatcagatccaaattccttagcatgacgcgtgagaccaatttttgaatgacccctgcccaactttaaaacttagcttctgaccatgactccattccatgtcttcacggagcttacattttagtgagcatgataaatactaaacatgcaattgccaaaatacatattattaaaaattaaggtatagctatggttaaaaaatatatggtataaacagaaatgattttagttttaactaaggattctctaatgaaggaagggcactctgataaaacaatattgaaactgcaacctgaagcttgagtagaaattagccagataattcaacaaagagtgagagaaagagaattctgggcacaagagaccatctgggtaaaggcactgcaggcaaagagagtttgggtcaaatgcaagtggaagaccaagccagaggagggtgagagaattgagatgaggttgcaaatgtagacaaggtccagatatgcaagcaatgtgaaccatgtaataatcttctaagagcaatgcaaagccagttaaagattttcggcatgggactcacacaatcaagactcaagcctgcttaaaaacaaaacaaaaggccacgtgcggtagctcatgcctataatcccagcactttgggaggctgtggtgggcagatcacgaggtcaggagttcaagaccagcctgaccaacatggtgaaaccctatctctactaaaaatatgaaaattagccgtctgtggcggcacatgcttgtaatcctagctactcaggaggctgaggcaggagaatcacttgaacccaggaggcagtggttgcagtgagccaagattgcagcactgcactccagcctgggtgacagcaagactctgtatcaaaaaaaaaaaaaaaaaaaaaaaagccacacagaaaaaacaccaaccaccaaaacaatatggctgtttggagaaattaattagaaagaacaaaattgaacacgaagaaaccatttagaaggttattgcgatagtccaagtgagagatgatgagagatgatagaagctggattagagtaggggcaatgtaggagtggatggctttacactatgtagaggagctacagttgctgaaggtgggtgatggactggaggtgggggaaggtttcagagatgcctgttgtactgttgacatgagcatcattgtactcggagttgcatttaccgtgacgtgagacactgaaggttgagtgaccttttagaaaaagattaagagttcaatttttagatgtgaagtctgagctgcctgtgagccataccagtaaataatttaggaattagatgttttggagcacttagggataatctgggctgtacacatatgcaagaatccataacctccatcctgtccacaaattatctctgattagatcacaatcagtgagacaaatctgctaataagggctgctgactaatggtattcttatgtcctcctgagacttgtactgaggtcttagggaatctaatatatgttgaggagttttttgctttcctctgaaaaaatgtgttagttttactttcagcatcagcttgaaatgaatagaagtagaggtataacatccgaatggaaaaattaggacacaaagcatccttctcttgccttgtctcccctttcacgggttccaaaccagaaaatattaaaacattctcacaacttactgtatgtctattttgttttgtttgtttgtttgtttgtttcttttttggagatagagtctcattctgtcacccaggctggagtgtagtggcactatctctgctcactgcaaactccacctcccaggttcaagcgattctcctgtttcagcctcctgagtagctgaaattacaggtgcccaccaccatggccagctaatttttgtatttttagttgagacggggtttcgctatgttggccaagctggtcttgaactcctgacctcaggtgatctgtccacctcggccttccaaagtgctgggattacaggtgtgagccactgcacccagcctgtgggtctattttgaaagagaatgccctgtctcccacagtagccagttcaaattttaacagatacaaatgagtcaaaaaagctttaactggatgcccattaagctgatttgaagttgtgtttaagtatatttatgcatacacacacacacacacacacacatccccactctgttattgctcattgtattgttgactttcatatatctgttccccctacataaagtaccttctcaattccctcttcatgtcaacacatgcacattgcccacttaatacttattcattctcctttggattttggtccaaatttagttacaagagaaacttgccctgaattctcagatcataacagctttgacaaaatccccatccctgccattttttcagtctttcatagtactatgcatttttcttcacagcattttttcacaagttctatataaatatacatttccattcataaagtcatttcccgtctggagtacagattctataagaacagagacttgtgtccattgtctagtcctattctattctattctattctatcccattctattaccattctattcccagtgcagatcatgaattccctgatccatagttgatgcccaagaaatattgtttgaatgaataatgaagtaattgatcaaaacaatgtttgtttagctgggccatcctttaatttaaggttctgtgtttaattatattttcctaaattatacattttcagtttgagtacttttctacatcagtaaagactggatttatataatgaaatattatcttatttgttcttttttaaaaaacaacaacagttttgtattccagaaatgcattcaggggtgacctaaaaccatctaaataaagtttaataccaccacccactcaatcaaatttatcccattaactcacatttgtgacctcaaatttcaactattttaagtctacttgcaaatcagcattgcaaatacacttttctgtgaaaccaatccgcaaaatccagagttcgctccaggcaaagcaaatgtattaattgtatgtgtttttatttctgtgcacagatttgagtatatactatagaaatctttgaatttatccttctccttttcttcttcccttttttttttttttttttttttgcatttcaaatagctgccaaaataatttaagaagactagtaaaaaaaaaaagacagcttgtgattcatgaaaaaaaatgaggattttggtgacagggtaaaacaaagctaggcaataaaagataaaaaatggcatgaggtttgtccacaaaataaatgccacatttgctaaacattagccatgaatttgcctgtaaagattttaggagcaaggcagagtgtctgtgcaacaaaaacccattttttttttcaggagttgtataactcttcatgtctctgatactagaaagaaatttctttcattgtggaatacaatgagcaacatttttatagtaaataaagttgccacatttgccctggtgttccttattttactggagcgcaaagaatgtggtccaggtgttcaggtcttaaacatttatatcagtggttctcagccctgacttcatattggaatcacctttgggacctttgaaacaatagcaatgcctgggccccaccccagatctattaaagcagaacctggaggtggggctctggaatcagcatttttatttttgtttttgttttattttgttatagttgcatcagtattttcaaagcaccccttgcaatactaacatgcagactggaatcagaagcactcctttgagtttctgttccagtggttctcagttttgatttttaattggaattatatagagaggcttattaaaacttatcaggttccacatcaaaccaatgaaatcaaaatagctaaagatgggaggaggcaccaggttttttttttttttttaagtgtcttagatgattctagtgggcagctggggttgagacccctgacctatagtgaatagatggattgtatatccttaaggcaattctgcattactatggtttgttatggtttgtcccagtaaaacttttaaggcttaagggtaactttgaagttataccccttgagaagaacctagagtgtaaagatggtaaatttaatcattaatggttaaattcagttttatgtgagtaggtggtaaaaaagctctgaaataaaagaattctattgaattctatagaattcattgctcttatgttatttttaaaaaatggggagggcatgatatttatcaattataattaaaaacactttaactggggcattagcaaagtgcttctcaactgtgaatgatgttcaaatagcttagaaaaacaagttttttagcaacatatttatgatatattacttcaactattttcagataaaaacatggtataaactttcaaaaaccataaaaccaaaacaattataaatactaacaaacggtacatgcaataatatttaaattattaatgttacttctatttggtagataatcctgagctttttaaaattaaattctggatgttagatttactagaagaaagatgtcttttcataatttgtcctctacttctcattttttatttattagatttcaagtatggtatgccattgcttgaggcaatcatttattactgccatttttttttctttttaacaatgagattgtccttaatgtgattcagtattctgatgagccaaagcatttgagtcatgcctctaagtaaaatacaagcaaattaaaaaatactgttctttattgcatatttacttctacacttactactaatgagctgcacaaaggtcagatgtgctccttatatttgatccaaatatgagaaaagtgcagaaagattttttttttcattttgtattgtctatttctgtatattgtaaagactcaacaccttactaactggctttgtgagtaactctacatatgtacaggatcacatgagcatatttgacctttattttattacataacttaataaagattaattttaaatatattgcaagttctcaccgcaaaaaatcatattgtgtaaataacaaaaataatgtaacaagtaaccacgttatgcagaccaaatgtacttattttaaaatttagacaggtcaacctgaaagaaatcagatgcatatcaagaacattcaatgtgcaacatttttatttcagtgaataacttgggtcaatgtgattattaacacactactaaatccagaacatggattcatatagcagtaggaagtatagttgttattcagataatccaaagtaactaaaaactctaattgagtagatatgtctctctaaatattttggagacttccaggttcctatagatatcagtataaaagatgccaagttatctttctaaccctctggtcctgcttttgcataaatgaattaaatgagataaataacataagtaagttaactaggtgaaaacaataaatatattttccatatactaattttatagtcaaaaattgatcaaaatatatttgtttaataattgtttttatgacattcctttaagataacctgaatagtcaattttattatactttaatactttatacagactttatttttagaatggctttagttttgcaaaaattaagatagtacggagtgttcttttttttttctgagatggagtcttgctctgtcgcccagtctggtgtgcaatggcacgatcttggctcactacaacctccacctcctgggttcaagtgattctcctgcctcagcatcccaagtagctgggattacaggcatgtgccacccaacctagctaatttttgtatttttagtagagacagggtttcaccatgttggccaggctggtcttgaactcctaacctcaggtgatccgcttacctcggcctcccaaggtgctggggttacaggcctgagccacctcgcccagcctgcctcgtacagagtgttcttataccccacactcactttcccttattactcactgtagattgaaatagggcatttctcacaataaataaaccaatattcatactttgttattaactgaagctcataatttattcagattttttagtttttagctaatgtcctttgtttattgcaggatcctatccagggtgccaaattacctttgtcatgtctccttccttaggtttctcttgtctgtgacggtttctcggattttccatttttgatgaccttgacagttgaggagtactacccagttattttgtagggtgaccttctactggaatctgtttgatgtttctctcataattagactaagagtacgaatttggggaaagaagatcacagagataaagtaccattttcatcacatcgtatcgagtacatactatcaatatgattcatgactgttggtgctgacctcgttcatctggctgaggtagggtttgtcagatttctccactgttaagttactctcttccactttccatactgtactcttcaaaaagaacttactatacacagcacacacttaatgagtggagtataactgtttggaatttttttgcatatgagatcctttatcccccatttattaatttattcaatcacttaattacatcagaatggattcatgacctatgttttattctttgagttgtaatcccaaaccactttgttttcttgctcaaattgttctagctttggccactggaagttctttcagttgttttcttttttattttttggagacagggtctcactttgtcacgcaggctggagtgcagtggcaggaacacagctcactgcagccttgacctcccaggctcaagtgatcctctcgcctcagcccccaagtaggtgggcctacaggcaccctccaccacacctggctgatttttgtattttttgtaggcacagggttttgccatgttgcccaggctggtgtcgaactcctgcgctcaatcagttctcctgccttggcctcccgagatgctgggattattaggcgtgagctacagcgcctggcctcagctgttttctaagtgcctttaaaatagcacttcctttctttatagcactacaaaatgccccatgttcatcttttttatttcttgacccagcccccaaatcagccatttctccatttattttaacccactctgctaacatagcaaagaaatatatgcatgtctactaagatgtgcatacacacaagcacacatattcaaacacatttagaccccaaatccttgcaattattgatttactgactttgtaagcacattgagaatagatgccttgaacttattatctgatgtctttctagcaacagacaaaataccaggcatataaactagtgcaagatggccgtacagtttattggataaataaataaaggaatagtctatttctgttaattatatactatgactttttaaaatttcattaaatatctttctatgagatatttttagggctgagtatcagtctattatatcactctttattagtataagcattaaagataaaatatataaagcacctgattcaatgctgaactaataggatgtacacaagaaaatcctttatccaatctcccttagcgtgtttctaatatttaaattacttaaattgtcttttgagccattctgattattttcttggacttgtaattatcagaccaaataacacataatacaaatactatacaaaatatttgtatatattttaattgctttattccagcagttgttcgaaagtatccaaatactctgtttcttcaccatcactgttatgatacaacgaaaaatttcaatttaacaagtgaaatattgtattttctcattgttagaaatgacatttctttgcttactggcgaggcaaaactatttttcatgtctcttcaacgtattcattttatttgatcatttttgcttttggcatatatgctttaaaattatttatagtaactctttatatagcagaaataagaatatgaaatctaaatccacgtaaatagctttatttattgtctgccttttaattttatttatgctttcttttgatatacaaacttcatacagtatttatataatactgatgtattacagttatatcagttaatattttcccttatgctttctatttttcttgacttcctctgtacattcttctataactattctagttctcaggaagatctgcccatataaattttaatgcatgatgtgagaagaggaattcattctctttttcacattttttagtttttatctatgccttttatttatcaatactttttattgaaatagctattgtcttactttttttcaacacattgtctttgttgtatactctagtaagcagaatagtggttccccaaagatgttcacatcttaatccctggaatttgtgactatgttagttacaaaacaaagaagaattatgtctgaaggtgaacttcagtgattgcagatgaccttaagatagggagatcgtcctagatcagcgggatagatctgaagtaatcaagaggatccttaatgtgggaggcggaaggggacgaaccagagcgatagcagcctgtgtggctttcaagatggaggacggaagccacaacctgaggaacacaggcaacttctaagagctggaaagagcaaagaaacagattctccaaagcttctaacaggaacacagtcataccgaacccttgattttaaattcgaacgcctccatccctgtctatcactttactctgctttatgtatttttaattacttatcactatcgcacattatataatcaacctatatgttgatttttaaattgtttttctgcttactctaaataaactctgagaataataacctattctgttttatgtactaatatattcccaatatttagacaagtgccaggaagatagtgtgtgtttagcaaatgtttttggagttatttcacttattaaaagcatacttggatttttttctggattttctagtccacttcataaacgtatacaatgtagtatgttaggaaactattcatattctttgtctgcttttacagttgtgttggatttttagtttattttcacattaataacataatattttagttataatattatttaaaagttctgaacaatcttctcttattctactttttaaatgttttgcgcttttttccagctgaacttcaaaattgttctgttaaaacaggaaaaaaaaagctacataggattctgattagaaatatgtaaatgatatgatcatgttggggatgatctgaagttttacaatttatatcgtaaagttttctaatttatatcctttcataattatttagatagtttggatttgggggtggggaggagcagttattagttttattcctaggggtcatatttttgttgtcactacaaattagattatttatctattgtaattttaaactgtaaaataagaatattattaatttaatgctctcattttgctactagctaagttcctgaactatctatgtagttctaatggttgtctacattttacagatgatgaaatgaggcaactagagacagctaattcgagctcacatttatctcagttcaaatgctgttttccaggttctttttcccattagactgtaagctcatatcttcagaagctgtgtcatttcatggcttctctaccccatccccatagaaacagctattacaacacaaaacagtgattctcaattgggggatgttccctaccccgcccagggaaaatctgaaaatatttggagacacttttggttgtcacactgggaaggttctactggtatcgagtgagcagagcctatagatgctgctgaacatcgtacatcacacagcataggcccctgagcaaagaatcatggctaacactcaactaagcacttggatatgctacacacacacggactattttactcatgttatccttgcattacttgtcatcaagtctcaaaataaccttctggggttagcattatcttcatccttatcttttcaaaaaagatgctgagcatgggaaactagattgtagagtcatccagttaataggtcaagccaagattcagccttgggcagtgtggcctcagaaccacatttataatagtatgtactacttgaagtgtttttcacttagttacattcaagttagggtctccttcagtcctaataatctacgaattatcttagaagaacaaattgaaaatcagtaacaattggcatttacttattagtttaattgcataaggatagaaaattgtccatctcctgggtcactttctttcctagttaatttgaaagttaatgtttcactgtgaaagatgagaatataaaaccaaagctctctatcacctgagttcagtactttctcctgaactttttatggggaatcataaaagctgatcatggggatatttgaagctttatgtaatacttcccaagtatgaaataaagtaatgaatattttgtattgtttagtggttgaaaaaaaaaaagagagacagacacacctccctctaataaagaaaattcagaaaagggcatgatttattaagactctttattatggctgatgtcatgggacagaacaatattaataagagaacagataattgtaccatggcctgagaaacaaagacttaatacagattatctaaccttacatcattctcaagagaaagggaaggagcaggtgtaacatctgcacttggctgtggggaaaaagtgagaatacagagtagctcactgacttggccaaaaacattctgtaaatcagtaactagaaaaatgtctgtatttttgtttttgagcattcttctttgaattaataataattcttcaggaacaaactgatagtattcttggcaattctagcacttacattttcaagtgttttttacaagaatattgtgcttttccaatggctcaaactaaatatacttaactgacaaataaatatttatgaagtatcaacagtttatctagctctctgcaaataccctgtgttgaagaagtttgcccatctacctaaagaagcaggatgcgtagtatttaagggatcaactaattgataataagaaaaataggtaatatatactaagataccttttccaccttgcaattggcatgaattttctctttacaacaatccaatgatataggtaccaattttattcactctttgtacatgggaaaattgaaacagagagagattaggtgaactgccaactaacacagaagctgtctgagagagaaacccagacaaggacacaatagagtacatattttcaatggctttgccatatgcacagaccttaacatctgtcaattagtggagaaatgagagaataatgtccacagaaatcattggaaaatactaatgaaggttcaaggttcaaaccggccatttaaaaataattagtatatgccttaatcattggtcctggacttgggatatgccatcttaggaacattttgaaattgtgtgtgtgtgtgcatgtgtgtgtttgtgtatgtgtgtgtttagaagagtggaatttggttgccacaatgattggatgacttcctgggcattcaatagatggaggcctaatagtcctcctttataaacaagacataaaatcatcagtcctgcacaaagatgccttatcgtgtaacttgtgtaactttccaatgatcttttggataataactgaaaaacttgtttatgatcatgaacatagaactctactcctcttagattaaaacccgaagtaaatattttaatgcacagtgaagttgcaggaatgcagaaactagtaaatcacaggaaggctgacttttgatttgttttgaacttatactaagagttgttcaacatttaaaaaaatcatatcacccatggcaatagtagccatggaatttgagtcacaaatctaatatctgtatcaatcggtctttctagctctcatattttgagtgaattcacataaaaaacaagcatctgataatttttatatctttcagtgaagatgttcttagtcaatcacataataaaatatcttttaaataaattattttcctttaaagtttcccttataagtagggcatgctgttggtatttccaaatgattattttgtttcatctgtgactttcattccagaataagcaacaggacattatacaatacttgatataaaagggtatgatagagctgtgatgccctagtttagatgaatgtatgcagaaagggcatggggcatagagctgttttatttattcttttttcattatttcaacatattttttgagcacctactatgtgtcagcctacactactgtgcagtggtcctagaacagtgaataagagtaaattccttattctcatagcctttactttgtagtaaagaaactagcactacttagaaataagacaaaataaggcccacatatcctttcaatgtcatactggaacattgcctaataaactcaaccaaagattatttaattatttaggagactgtactttgttttattcagtatgtactattggttagggctcaaatgttgtaaagttgcatgctaacttatagattttctactgtctttgtgaaaagtagaaagataagttctggttttattgttctttggacactaaagagacttaatttagcaagcttatttcagtatggctttcttctaatattctgcaatcagcattcctaaacataaaatgtataaaacatgttcattgtatatattggcataagagtcatatttgaaacttattgaatattttaatttcacacattctagtaagagtcacagtaaagggatgaggttggaataaacattgagagccttaagagctaggcaaaagagattagcttttaagatagaaaatcgagatcaattatgtttcttaacccggttatctacttgacaagaaagatactaagatgacacacaaaacctgggaaatatttattatatttttgttaaatttaagtcaatggctatttgattttagttagagaatcttcttgtgctattaagcataaaatatcaattcagcacttcaaatgatattcacaactttctcttgatatggcaggctaatatcctaaaattccctcatataaagatttaacattccctcctaaaagtttttaaattccttcatgtaaaaattaaaaattcttgtgctgggtgcagtggctcacgcctgtaatcctggcattttgggaggctgaggtgtgtggatcacctgaggtcaggagttcaggaccagcctggccaacatggtgaaaccccatctctactaaaaactacaaaaaatagctgggtgtggtggcaagcgcctgtaattccagctacttgggaggctgaggcaggagaattgcttgaacctgggaggcagaggttgcagtgagccaagatcacatggctatactccagcttgggtgataagagtgaaactgtctcaaaaaaaaaaaaattgaaaattcttggaggaaaaaatatactatctaatgcctaggaagtttttgagaaaataaggtaactttttctagaataagaatgaagaagaaatataattttggggagaccagccaaagaagcatctatgaatgccctcagagaaccttccattccctggtgggctacagttgcagttagagtatttggtgctcagggattgggacgtaagcctggattcagattaaagatctcagaataaagttaagattctcaaggaagaacatcttaaggagaaatattaaactagaataatttgtctgaccattaagtcagacaaaaaagaaaatttatctcagcctaatattaggtagcctgagacattctatccctatagagatttgggcctagattaatcctatttgcgtggttcacaaaatgcaggctgggaattttaatctaaaatgaatttaggttaatagtgcccaaaggtaagtaacaaaaacaaacgaaacatttctctgagggaatcaatgaattctcacagatagatcaccactagacaggattcacaatcacaaatcccaaaatatacaaggaaatatcaagatatgtgtgaactacacaagcaaaaaaacagcagaataagacctctaaaaacttgatattaaaatcgttgggtacagtaagtaaagtaaaatctgtacaatgaaatgaaatatagactcaagtagcaagagtttatcaaataagcaggagtatttgaaacaaaacaaagcaggtagaaatttaagaaatattaaaataaaaaactgaaaaattgtttttacaagagataaaaaataattcgttatttggaagatacatttaaagaattatttacacataacaatggaaaataaagttgaatggtaagaaaaagtttgagtgttctggaggatagaaaatgtccagcatcagccaaagtggggttatatttaactcgaattaatatatacaatggggaaggtcatattcaacatgaatgataatttttcagaaagtcagattctgaaattagaattcccaagttgtcagaattaggaagcatgtttaattctaagcagagaaaaatatattctttgccagatgtgttgtgacaaactacagaacatcaatgacaagacagaaaaatgttaatacaagttgagggaaagaaagacagtttgcttacaaaggaactacaactagaattatagctgcctattcaacagcaaaaattaagccagaagacagtggaatagtatctttaaaaatagggagagatttttgcctctaagagaaatgcgggaatataggatttggagggacggatacagagagcttctcttctagagcagagaaatattttcctaatttgtcttgctaatctccacttctccaaaccccaaatatatgcaacaaatataaatgtcgtggttgttacttactaagcagtgttactgaacgagctacctgctctgatttcagaagtaaataaaacttagccctagccttagaggatattctagacagaacaatgttctctccccattcccaatgatgtccacatccgaatccccttaatatagaaaaagagactttgcagatgtgattaactcaaggaccttgacatagggctatcatcttggattatctgaatgggtccaatgtaattacaaggattcacgtaagagggagacaagaaagtcaacattaggaaaaggaggatgacaatagcagcagaggctggagtgatgcaatttgaagatggagaaagggaccatgagtcaaggaatgctggtatcctatggaaactggaaaaagcaaggaagcaggttattccctggagtggagccctcagtagaggtgcagccctgccaacaccacaccttgatcttgccctgtaaaactcattttggacttccggcctccagaactgtaaaagaatatgtttatattgtttaaagtttgtggtactttgttcagcaccaataggaaactaatctacattagtttatattctttctgaaggatcatgtgctatagaacactcatgtatgataagaaataagtattataatgtacatgtatggctcagaaaatagcacggagaattctatgaagtagagaataaagggacagaaacattgttatagagaaatgagacttgagccagctttggaaatctgtgtgctttccaggcaaacaagctcaccagtaacctctcccaacttgacatgccttccctgctccccaagcctgaggtctaaatgaggtgttccctccataggctttgaaagcacatcgggcatcatcagactcagggccaccttgtgctttttgttactgttctcacaatggcagaaatcctgccatcctggggtctgcgtctgtgtctcttgtagcaaaggagcccctagtaaggaatggacatgtggcattgtttgcagaatgaaggcggtgttagccaggccacagaggtgtgaacccactggcatcttcagggaaccaagcatgactccttttcactagggcataggatgcaagtcaagaacaatagagattgagaagctagagcttgcctgtggctcagtgtcagcattgggcagctctgatcatgtaattgcctccctccaaattttcctgtgttaccattgcggtttagtgaagtgacttcacttggcatttatggccttggacccatattatgtcttgaaaccacctttctgatctaatttgctcttatttccttttatttgctctcaaccaaattaaactcaccttatctttttccagctctacattttggtcaaagctcttctcattcaacgttacctgaacatttctaactccccatccaattgaatctccaactctttaccctcaaaatttcacctaaatttccatctcatacatgaaaaccttactgtgtttctcctgtactcacccccagatatgatctattttttctcttttcagtaaaaaccagtagcactttgtctttctatatgacagtctgccccttcaagtaacagtcatgtaccaatctgtgccacctttcttttgtccctggactcaatcatcttcaagggcatttctcaattattcatttgatgttggttcttaccacaacactgaacaaattttaaatactctgtgaccaataagaatataggtgcagcaaaccaccatggcatatgtatacctctgtaacaaacctgcacattcagcacatgtatcccagaacttaaagtaaaataaaacaaaaaataaaataaaataaaaataagaatatgtcagattaattttattttgaaactaacaccaatacaaaatgtgatgactgttttaatagaaatccagtgggttatcactttattcctctgttgttatgtctaaggcatgttaaatgatctttctaaaaggttatgcctaaatttaccagtcatacacaattacatccatagtcaaaacatgttttgtcatctatcagagacagtcgactctactcctaaggcatttcaagttttgtcctttcaaaacaacaggtgggtgttattctcccaggcaatcctgtgttatgcctagaagatagcagacagccacataaatcagctgtactttttcatataatcattagagaaatgtaaaaaactgcgtagaaaaaaagcacctaaagcttaagagaattactgatcacgaaaggtttcaccttatttaatattttaggtgtggcccccttgataaattgaaatagctttgggtttcttgttgttgttgttttgcttagtgtgtgtgatccgtgtctaaggcaataaaatgccaaaccttcactcacctgagtggcaaagcctgcaaaattcaatcaggcggtgatctctagagtatagcattttcaaagaatattcaaaagctaccagctgtaaacataacacacacacaaaaaaacagaaaaaccaaaccatgcatctcttagctggctgtaaatgtactaatcagtgatttggggggaaaaaacggtgtaaacatggtggatatattttcgacagtaatcataattcttgtccagatgatgtgaagggttataaaataagcctgttaggtttcccaagcacttgtgtgtcgagtatatgtaaaatgcttcattaaaacatcttagactttacagtggatattttgctggtattaagcttgtgtttgtaaatagaagtgctaattatttaggcatgcaattgctcacacgaatagcctatgggtcagagtagttttagactttacttttttctataattaaacatatagcatttaaagaacatttttttaaaaaacatgaaaacacagtattccctggagcatatcacatgtgaatttagaagccagattataacgcaatttttgcctgcaaataaatgagttcaacattaacaataattagagacataaggtcctctgaattctaaaaagttacccccaaatctaaatattatttaataaatttaatagttgcataatattgatttccccaaaatcacgggtaaaaggtttttcttgaagcagttataagctatattgtggcaaaaaattagccaatatacttaatcaggataaaagaaaaatgaataatacaatttttaaaactttttttaattggctttgggagaattttgagaatttgccaccatttacagtgacataaaagagataatcatatgtttcttatactgtgatgcagccagccactccagactgaacaaactggtgtctttttggtattcccattcggctctatctgtgaacttgactatgaccctgactcaccacagccaaacctgaaaaaaataaaactacctatcgggtactatgctgattatctgggtgatgaaataatcttgacacaaaattccctcaacacacaatttatctatatggcaaacctgcacatttacccttgaacctgaaataaaagtgaaaaaaattaaaattaaaaaagataagatttagaggaaaataaatctagtcaagacatagtagagatgctgtttggttggctgtttttccctccacctaatactctatcatgaacattttttatgtcattacatatttgtctacctcattatatttatgatgatactgtgtttcattgtgtgaatatgcataagcataatttatgtaatctactgattaaatatcttttttacttatagtagggaataaaataatgtatttttgaacttttttttttcggaagtaaattatatttgcttgcaattacgcttggctttatgtaatacacactcatgctgcttatacaaataagatgtttatttttctctcttaaaaaaaaattctagagtttggcagctcagggctggtgcagctgctctgttaagtcctcaaggacagaaactctgtctggaggcctgattctagcaaccaagcatgtaccatttgtcctcagagtctcagaacggctgtcacctgcaggcaaaggaaaggcaagtgtgtccatgttcctgagactgtctctatcagaaaatacaaaactttctagggagactgacctaggagattctcacttaggtctcacaggccagacatgggtgacgtggtaatctctaggtcaagaaaatattgagaggagaatatttttaacagggcacgtttatgctctgaaaaatgtcagtgttctcttagaaaataagaaggaaaaatggatactgggcagccaactatcagtgtctgtcacagaattatacatatgcataagagtatcttactcaagggtaattaagtgtccagtaattcttgggacggatctctgggtatagcagtaagtctttaaacagaactactgttacatacaatttgtagtttagatccatatatttgtcaaatatttgaaattacagttctataaacatttcccatatgtaatggtagaggcgggtggagagaaactcacctatttctttcttatatctttaataacacccaggcaacactctacccaagattccttagaaaaataattaattcaattgtccttgtgctaagagggacaaaagcctaatctatgataataatgagagtttccaagaactgtatcagtaaacagctgagatttccttattgcttttccttaaaaaagtcaattccacctcacacgttatctcattcatctttacaatgtaagtgtcatttcctgttccttctggatcgtgtgttccctaatcagtcaaatcgcgtcttccagcctccgttatgaatatttccatcgcttgtgcgctccaggaaaacctggccacctacaccctccctgaaaatgtatttttgcctgcagtgatctagagaaaggggaaggctattttactgacccaaatgcttcaactaaatttgatttcagccttggaagcaaagaggcattctcctcttattcagcgtcattgccaactttaaatcaatacctctcccattgtcctaaaacctccaaatctaaagatcttgctatcagattatattatatacttctatccctcttcttcacacttgatatagtcacttaaagactcctgcgtcactttctctcattctttgaacattttagcttttgcctttctgtcgctttctctaccaatatttttgtctttattgaaaatgaattcatgatacattatgataatccggctgatgtcctgggcctctccattccccaccatcatctccaatgatcctactttctacttcagctcagccagctacttgaaaggcacacaaatcttaactgaatattagaagtatataggagaaatttaagaaaatactaacatctgggctctatcctcccagatgttgatttaattgttttgatttaaattctccaggtggggcttatatgtagcccaagagaatgactgcctagacatttttattctcaataatttcacctcttatattctcaataataagtgaacccaaaatatctgagacgagtctcaatcaatttagaacgtgttttgccaagattaaggaagggtccgaggtggtcggaggacagcttgctttaacacatttgagggagacatgagagacatcaatcaatatgtgtaagatgtgtactggtctggcccaggaaagtgggacaactccaaatgggattactccaatctaatagagcattttactgctttcctattgctactgtaacaaattacaaacatttagtggcataaagagcaccaacttattatgttactcttcttggagtcggaagtccaaaatagataggcagggctatattccttctagcagcactaggggaaagtccatttctttgtcttttttcagctagtggcttccttcatccttggctcatggctccttcttccatcttcgcattcatcagtgtagcattttctctctcctctctctctctctctctctctcttgctctctctctttctcctctcacatctcttctaactcttccgctttcttctttcccttatcagaactagtgatttcactgggcctacctagatattcccacataatctcttgaagatttttcatcacgttttcatttcaagatttttcattacataatctcttcatttcaagagtttttttaaaatcacataatctcttcctttcaagatttttcatcacatataaggatttttgccatgtaagataacatattcacagggtctggggattaaaatgtggacatcttaggtgggtcatgattttacctattattacataagcattcaaaccatgcaatacagccagtctttaaaatcaaacaaatgaatactttaccttgaatggcaaccccttcctactgctatttctaagctcttttaaaaataaaaatcgatagaattgcctcttctgttttctttgatatatttcctcccattctcttttcaattattttcaagcggactttgttcttcataactcccataaaaaactctttttaaagccactgataatttccacattgttaaattttgctatgaattcttagttctcatcttacttaacagatgagaagaaggtggtccattgacaacttccttatttgttcagtgttaagttctagggatgtcactttcttctggttattttcttacctctctggtgaatttttcacattctctttggcgagatttttctttttgccaacctctaaacactacgtgttccagagtgacaatataaatgctctgatttctgtgtatgtgctgacagcttccaaatttttatccctagcttggagcactcccctgaaatgcagagatacatgcaaatgtcaactctgctattttccttgaaaatctccacaggcatctcaaatctagaatgacgaagaccaaattgccaattgttacaaataaccacgccaaactgcttataccatctcagtggcaattctctcctgcagagtttattcatccaaaaacatcggtgctaccctcatagcatctttgtatttctgtcttcaggttccactgatcagcatgtcagttttgcctgcaaatatgtccagaatcaaatcacttctcaccacatccaccactatcagctgatccaagccaccatcatttttttgtcttcattcagcagtctggtctcctagcccttgcacccctacaacatattttcaatacagcaaccaggatagtcttttaaaaatgaagtcagattatgtcattcctctgcttaagcctgaaaaggcatctcctcttactcagagtaagagtcgaaccccttacaatggctcactacctcactacctctctgaactcatctctggcaattgttttccttgcctgtattgcccaagagaagctgaaatcctggcagttactcaaactgcataagcagtcttcctcttcaaggctgcactctcttttctccacataggaaagacattccttggatattcccatggctcagtttctcgctttctttaggtctttgcttgaaaagttttgcctttctcctacacaggtatttctattccttgaccctcatctgttgttttcaataatacttctttcaacttgtcatattatttatatggaaataaacaaagatgaaccaaatgaggaaagcaaagtctgtttatacagaacttgccatggccagggagtcagccaccaatgtttgcattttggcaaagtctcaaaggcaggcagaggagtggaaaagcttcatcatgcagaaaagggaagacctcaaacacaccttaattgaagaagtgggaagacctcaggtaccctctaattggagactttaacatggagaagctgcaggtggggtaatgatagctggatattccatgtaattgtttagggttgcatttttgtttttttctggttggtcctatattgaaagcagtgacaaaaatgtgagaaactgtcagttattaatgaaattctggccatttggggctgattgttatagaaattattgtttagcttatggtatcagtactagcaatagcagtctgactccctacaagtctgacttatagcagtctggctttctgggatgtttattgtaaataaaggattggttttctgggcaagttcctgtaggttgttggtcagagttctgtttttgaacatgacttgaccattgtccacttatatgtccagtttctcatatatttgttcttttagacgtataatagttgtctcttcctactcacatgtaaatcttgggaaaaagacagtgtcaggtgatttattatgttaggaaccaagattcatgtttgtgaattttcttattcccagtgccttgcaatagtccatgatcaataaatatttgagtaaaagggggccatatatggtcatgcctattttcttgagtggttacatgaaagatatgccacatcaaatagactgaattacttaatctgagaagccaagattcagtaattttgtttgagtagattttgtttgtttgtgtaggctctcttgcctgcaaatgacttggaaatgacctttcaaactatggagtctctaaagagagtttaaaaaaaaccatgtgatacaagccatactgtgtaatattggcttaataactagaaatcgatttgcattgctttccctctgttatggctcacgtttgaaagccaaagtaatagagaaaaataaagctatggtcaattctaaatataatccacaatgatgagttgttccaaaggtctatgtcctaccatttatcatgttttgatataaacctttcatcttctctatttacaaggatgatccatgcttgtttcttctgcacaaagtagactagagcaccccctggtgtttggatgatatcactaccctcttcagtatactagggtttctatgtttgcatgaagtgttaatatgagagaagtttgttgttgtaatgtctggcacttaatactgaattctagatccattagttgtgttataaccatcttgattttagggcatcattgatctattaattctcatctgagctcagaattccgaaaggttttccctaaatgttaccatcttcacccaaaatatctaaacatttatgcatagtctttaagtgatatacagttatccccttacatttcaagaaggactctttgtaattcaatattattgagaacacctacactgttctgagctgtggtaagtgttttgcaggcatcattatattgaatcttcacaaactaacttatgaggttctgttattatttcaaataataaatatatttcgaattttatttcaaataataaaactgacactctcagaggcttcataactcctaggttttcacaactagtggtttgcaaaggtgggatttgcagccagttctatataactttatgaactagagagcttacctagtctactatatagtctcattcttacatgttttattttgagttgttcacactcttgttttcaaaaataaaccagtcctccccaccacaacaacatctgtatggatcccttactttctaaaaatgaccatggggtccttttaattagaaccaaagttctaatactaacagacacttctgatcctaaacacaatcatgagacagatgaagtatttaagtccaaagaacccggcaatttcagtctaactcccttcgtcacctattgtcttattttagcttttctcatatgcttcctgccagatgcttttttgaacattatagaatacagcaagtatccatctgaaaatttaaaaaatataaagtattttaagtgtaaaattccttcaaggtaatccagggcttcttaaaagtcaagatctagaatgttgtagacagtaggtgttcattaattattttttgaatgaatgaattatacgtaaatgaagaatatacccataaattcagagtgatctgtaaaactcaagaaattgtgtgtgtgtgtgtgtgtgagagagagatgagatttcatgactaaaagctaaaaatcatctctatttgtctgagctctggataactcaggttagattccttaatccatttcatccagaacagagattttattatttactagttttttgactttgcatgtaagggtctaacatttaaatttgtgaatttcctcatgaagagacaactgaagaggtttttgcagaactgacctggggagtgatgctggagctctccagactggcccaggaagactggtgaatctctgactctgagctaagtgcagaccatccagaaatacttgctgaatgaaggactagatcttctaaattgccaagctgggtaatttttagagaaatgaaattttaggacattgatgctaaggttaggagggcctatcaatgccaagacttgagaaatagtagaggattggaaggacttctcagactgaactggattgtggatgcttgaagaaaaacttccaccgctgtttagggagtgtgttcttcataattctgtcctcttatgctatactttttttctccttttaagcagcaatatataggattcctctcccagttcaaatatagacagtctctaaagaccatctctctgatcccaaaaaacagaaaaaaaaactagttaaattacaaaatcaccatttattctttttaaaccccaaaagaagggagaattacaaaaccatcatttatctttttaaaccccaaagtaagagacactgggttttgcaaaatgcttttgcaaaaatatctttttgctggcaaatacccatcttggcttcatattttttaccacttgtaaatgaagtccaattctgctgaaattctgaaacgcattaatgcattgagtgatactgtttactgggaataagtaataattttcacatctcaagttaaaaccctttaatttgcctcctaagaagtggcctaggttggaaaacaataaaaacatctcaaagagaaagaagaaaacactgagagttagagaatattttactaaatttttaaagaatgttagctttgcatttgttcttggaagtgaatcagtaagtgaatttgtttctgaatatacacattcacaaaaaaaatcagttttttctgtttccattatataactattgaatgaatatttaaaagatattagtttaatatgccaaaattatcgacggcccagcatacaaaccagccttgtctgtttcagaaatagaagagacactggtgtttgagaggcacagggcactgaaagggctttagatttggatatatctgcatttgcgcactgcttctccacttactgtccatgtaatttgggatatgttccttagcctttctgaacataactttcctcaggtaaaagagcttcttttcatagtttatgtgaggattgtgggctatttttgtaaagtccaatcacagagtgtatgccttatgaaaagattggctaccacggctgcaatgattaataatatgttcatattttcctttctgattattgactatgtttgggaagagtgatcatttaaaatcaaatattgacatgttaatattgcttatctctttgaggcaggggttttagatgacttttacttttgtatgtaattttatttttaagtgaaaagtattccacaagattttgtatattatacaaacatataattggaaacagagctaatgaacaaatcaattttgattatgaaagaattaaaataaagttgggttgatatcagtctgtagatcaaagatgcctcaatgaaaaattttgttctgggttaatccaaggcacaaccctcctttattaagcagtttgttatgtcatgcaccagaattatccacatttgagttgatgaacaagtttcattccctcttggtgcttcatagtgcttcagagagaattcatagtactctgggtatttggggggtgttttgaagacatgatagtcacatattgatgcttctggatagttgctcagttcattaggttctccaaaggcttactgttaaaagactatttcttaatcccactactggatatgtaacaaaaggaaaggatatctgtaggttgaagagatatctgccctcccatgtcaattgcaggactatacataatactaaaatatggaatcaaccaaagtggtcgtcaacagatgaatggatttttaaaatgtggtgtttatgattcagccataaaaaaggaacaaaatcctattattcgtggcaacatagatgagcccagaggacattatgttaagtgaattaaactaaatacagcatgttctcacttatgtggaagctaaaaacattgatctcatagaagtagagagtagaataatggttactagaaactgggggtagggtggaggtgggtagccagaagtagggtttgagcttttttcccacataaatgtcttttgagaagtgtctgttcatatccttaatagcttaccaaccaaaaaacatccaggaccaggcggattcacagctgaattctaccagaggtacaaagaggagctgataccattccttatgaaactactccaaacaacagaaaaagagggaaacctctctaactcattttatgagaccagcatcatcctaataccaaaacctggcagagacacaacaaaaaaagaaaatttgaggccaatatccctgatgaacatcgatgcaaaaatcctcaataaaatactggcaaaccaaatccagcagcacatcaaaaagcttatccaccatgatgaagtcaggttcatctctgggatgcaaggctggttcaacatatgcaaatcaataaatgcaatccatcacataaacagaaccaatgacaaaaaaccacatgattatctcaatagatgcagaaaaggccttcgacaaaattcaacagccctttatgctaaaaactctcaattaactaggtattgatggaacgtgtctcaaaataattagagctatttatgacaaacccacagccaatatcatactgaatgggcaaaaactgaaaacattccctttgaaaactggcacaaacattgatgccctctctcaccactctattcaacatagtattagaagttctggccagggcaatcagtcaggagaaagaaataaagggtattcaaattggaaaagaggaagtcaaattgtttgcagatgacatgattgtacatttagaaaaccccatcgtctcagcccaaaatctccttcagctgataagcaacttcagcaaagtgtcaggatacaaaatcaatgtgcaaaaatcacaagcattcctatacaccaataacagacaacagggagccaaatcatgagtgaactccccttcacaattgctacaaagagaataaaatacctaggaatgcaactgacaaggaatgtgaaggacctcttcaaggagaactacaaaccattgctcaatgaaataaaagaggacacaaacaaatggaagaacattccatgctcatggataggaagaatcaatatcgtgaaaatggccatactgcccaaagtaattgatagattcaatactatccccatcaagctaccattgattttcttcacagaattggaaaaaaactactttaaatttcatacggaaccaaaaaagagccgtatagccaagacaatcctaagcaaaaatacaaagctggaggcatcacgctacctgacttcaaactatactacaaggctacagtaaccaaacacggcatgttctcactcataagtgggagttgaacaatgagaactcatggacacagggaggggaacatcacatacgggggtgcctgtcgtgggctcagggggctagggactcaggatagcattaggagaaatacctaatgtagatgacaggttgatgggtgcagcaaaccatcatggctcgtgtatacctatataacaaacctgcacgtcctgcacatgtatccccagaacttaaagtataatagataaataattaattaaaataaaataaaataaaaaataaacaccttctgaaggcaaaaaaaaataataagaatttcattttattttgccaacagctttaaaccaaaggacattaatgctgttttagaactagaaattttctatgcagtttgttctcacgtatgccttcccacaatgataatctggagacttaagaagtttactctagattccccaaggctacagacaggccaaactaaatacttgagaacacacgtacctctggcaaccaataataaacttttctgattgtttttctttctcaagtacctagagaatattttcaagtctgtggagaatatttacataagagtcaagttcataaataatagtaaaaattgctggattttgttcatacaggtcaaggagtgaagcagtaaaccctagaagcaacaaacaagtgtttattgaaaacatattacataagcaatagtctcttttttgctttttacttttaatttacatatcattgtatatatttatggtatacattgtgattatttttactatattttaagttctgggatacacgtgcagaacatgcagttttgttacataggtatacacgtgccttggtggtttgctgcacccatcaacccatgatctacattaggtatttctcctaatgctatccctccactatccccccaccccctgacaggccccagtgtgtgatgttcccctccctgtgtccatctgttctcattgttcaactcccacttatgagtgagaacatgaggtgtttcgttttctgttcttgtgttagtttgctgagaatgatggtttctagcttcacctgtgtccctgcaaaggacatcaactcattcttttttatggctgcatagtattccatggtgtatatgtgccacattttctttattcagtctatcattggtgggcatttgggttggttccaagtctttgctattgtgaacagtgccatgataaacatatgtgtgcatgtgtctttatagtagaatgatttataatcctttgtgtatatacccagtaactggattggtaggtcaaatggtatttctggttctagatccttgaggaattgccacgctgtcttccacaatgattgaactaatttacactcccatcaacagtgtaaaagcattcctgtttctccacatcctctccagcatctgttgtttcctgactttttaatgattgccattttaactggcatgagatggtatctcattgtggtttgatttgagaagcgtctgttcatgtccattgcccactttttgatggatttgtttgttttcttgtaaatttgtttaaggtctttgtagattctgggtattagccctttgtcagatggatagatggcaaaaattgtctcccattctgtagtttgcgtgttcactctgatgatagtttcttttgctgtgcagaagctctttagtttaattagatcccacttgtcaattttggcttttgttgccattgcttttggtgttttagtcattaattctttgcccatgcctatgtcgtcaatggtattacctaagttttcttctagggtttttatggttttagatcttatgtttaagtctttaatccactttgagttaatttttaataagttgtaaggaaggggttcagtttcagttttctgcatatggctagccagttttctcaacaccttttattaaatagggaatcatttccccattgcttgtttttgtcaggtttgtcaaagatgagatggttgtagacgtgcggtgttatttctgaggcctctgttctgttccattggtctatatatctgttttggtatcagtatcatgctgtttttgttactgtagccttgtagtatagtttgaagtcaggtagtgtgatgcctccagctttgttctttttgtttagaattgtcttggctatacaggctctttattggtgccatatgaaatttaaagtagttttttccagttctgtgatgaaagtcaatggtagcttgatggggatagcattgaatctatcaattattttgggcagtatgaccattttcacaatattgattcttcctatccatgggaatggaacgtttttccatttatttgtgtcctcccttatttccttgagcagtggtttgtagttctccttgaagaggtgcttcacatcccttgtcagttgtattcctgggtattttattctctttgtagcaattgtgaaggggagttcactcatgatttggctctctgtttatctgttgttgatgtataggaatgcttgtgatttttgcacattgattttgtatcctgagactttgctgaagttgcttatcagctgaaggagattttgggctgagacaatggggttttctaaatatacaatcatgtcatctgcaaacagagacaatttgacttcctcttttccaatttgaataccctttatttctttctcctgcctgattgccctggccagaacttccaatactatgttgaataggagatccttattttttacatttatacattctcccccaaaattcataattttgggaaatacattgggttttaatgtgctacctagtccccctcaaaagtctgtgatttagcaatgaggaaactgactcaggaattagttacatacattgctcaaggatatgcagttaattaaggaaaattgaaatactggcttcctgagtgaggttctagtcttcttcaatcaacactaggcttgatagatttgggaggagagctttctgattaaatcttgatttataaaagcattctccaacgtaataatgccagctgtgttctaaatgctaaaagactgcctttatgtcacagcttattttgaaatttataagaatagatgggacagagatactactggagtatgcctgccacatttgctataaaagaagaaagaaaagatttgatctgagcctcctcactattaatgcaatattttctcctcagctcacgttctacagtgagttgggcaagcactctgtgaaattatttccactacaaagtcagtagagtaagaatgtaaagtatattcaagacagatatcccaaaacttgatgaaaccagtagcctttagatcaattagtgacgatctacttttaaaaaaatccagagatcaatgaagcagaataaatagctcagaaacagacagtgagatatgtatgcatttttacttgataaataaggcatcagtaaactacagggaatggattatttaacaaatggagctgaaaattttactacttaggaaattaaaagtttatattcaccttttaccatgttaaaaaagtaaattctctctgtgaaataagatggcttgctggttgaaatgtaaaaatcaaagagtgaaatgaaagcagaaactgaatgtattgtgttgtggtttaaggatagaaatcaaagtgaaactgatatttgtttatatgaattgtcaacttatttttttcccacttggatatttccaaaaccctttagttaaatttaaaatatgaagcctttatcaaactagctctcagtcttcacttaagatgagtaatttttcttgaagcatggtaaaacagctgtctttcaatcataaatatttccacagatctagaaaatattgctggctgtgtgcaggggctcatgcctgtaatcccaacactttgggaggctgaggtggcaagatcacttgtagccaggagtttgagatcagcctgggcaacatagtgagacctcttctctacaaaaataaaaataaaaattagctgagtgtggtggtgcatgcctgtagtcccaactacttgggaggctgagtcttgaactcaggagttggaggatatggtggcaagctatgatcaagttgctgcactccagcctggcgcaacagaacaagacccctcaagactctcaaaaaaaaggaaaagatacaaaaatattttttgattcttccttttttctcttgctcacctgtcattttttatccccctttataacttctcatcaatttctcatcagcttttctcattgtttgattactttcctcagagtttaatggtctttcctcatccttttcctccgcagtcctgttttgattttctgccaagttaaatatctactgttttttgttgctgttgttgtttgtagagataggatctcactatgtggcccaggttggtcttgaattcgtggccttaaaggattcttctatctctacctctcaacttatcgcccaaaatgctgggattataggcatgagccaccatgcccagcttgtttttcatatatttatatccttaaaatatactcatttagccaggcatggcggcatgcctctgtaatcccagctgctcgagaggctgaaacaggaggatcacttgagcccagaagtccagccagagcaacatgggaaggctcatctgttaataattaaaaataaaaaacactgtatacatttattgattttcctcactattaaaatattcagtcactaaaaaatgagagtaaaaaaattattaacaaaatagtaatcacacttacttttacattttcatctttttcttttcagccattcttttcatgtatacatatgcaagtgcattgtttgtgtatgtgtgagagagacagaaggagagagagagagaggagagagggagtttaaatcatgataatggtaattatgcactttagaactgtttttgtcctattttgataacattatagcataacattatatactgactcctcagtagcagggaaatatgcattgaatggatggatgcaccatcgttaattgaacctttctccctgtggaacacatagactatttccaactttccatcattataaatagtgcttagattaataggcatttacaaaacatttgtgaacatctccgattattactaagcataaatttctaaattacaacattttatctcacatgccttttaaaaaaatttttgtcttcccttggggaaaatgtaactaaaaacaaaatctgccaactccaaacacctctccacaaaggtcacagagaaagaaaacaatcttatttatgttattttttttaattttatttttttttgaaacagagtctcactctgtctcgcctaggctggagtgcaatggtgcaatctcagctcatcgcaacctcagactcccaggctcatgcaattctcctgcctcagcctcccgagtagctgggattacaggcatccgccactgcacccggctaatttttgtatttttagtagagacagagtatcaccatgttggacagactggtcttgaactcctgacctcaagtgatcctcccgccttgttctcccaaagtgctgggattacaggcgtgagccaccgcgcccggccttatttttgaataagcattaaactagaatgtggtgcacaccacaagcaatctgctcagagattgaaaagacagaaacaaaccttacctttttgcatagccatgcagaagcaaccgttatatacatgtgttcaagataaacaatacctagttctcaagtaagagaacttggcaccatttgtcacacaaagtccatcctaaattcacctggtaattggagtgaccatctgtgtcagctaattagcttcatccagaggagaaacaaattttctatgtctttatgacatgagttattttgcaaattggagcagatgtccactgaagttaggctcctagccttccccagaaaccgggagatagggttagggatgctgtctcccttcacatttacattaggaagagatggcccaggtccttgagaaagatattcctgggtcataaaactgacgaaaggtctgactttttcttttttttttttttttataaggagtctctctctgtcaccacgctggaatgcagtggcatgatctcagctcactgcaacctctgcctcccgggttcaaatgattctcctccttcagcctcccgagtagctgggactacaggcacctgccaccacatccagctaatttttgtatttttagtagagatggggtttcaccatcttggccaggctggtctcgaactcctgacctcaggtgatccacccatctcggcctcccaaagtgctgggattacaggtgtaagccaccatgcctggcccaaaacacaccttttatatcatgtctatgtttcaaggaataagtgtatgtgaaagaaaaatttccctttaagttgtttttgttgttgttgttgttgttttttaatactttaagttttagggtacatgtgcacaacgtgcaggtttgttacatatgtatacatgtgccatgttggtgtgcggcacccattaacttgtcatttaacattaggtatatctcctaatgctatccctcccccctcccccctccccccaccccaccacaggccccggtgtgtgatgttccccttccttgtgttccctttaagttcttaacaactgtactgtaagcctggaatggaccaaagatggttccaaaatcgttggtggtctttccattgagaagaggggcctgtttttcttctccttgacctgggactgtctttgaccaattgcatatggtgaaagtgactcgtatttttccccctttggattcttaaagctctcagctattctgctgacaaactcccttggtgaaaagataaggtggagaggccataagaccacatataggggaatcattgccaaggcaccaggcagtgaggaaaactgttgacactttatacactagctactaactgaagaggatgctacaggccagctgagccctgcctaaattcctatcccatgaaataatatctaaaaacagtccgtgttttgagtcaccaagttttgagattttgtgttatacagcaagtaaagatttcagccattgtgggttcattggctcaatgcacagcaagttaatatactgagtgagataccagagattgcggcagacagagtctaataatcatatgagaagggaggaaacctcaaatcctcctctccaaggagtatggggctggaggttttaaggagctaggagtgggcagaaatgtgggatccgtgattggtggcagagtgcagaatgaagtcttggggcggggagaggaagaaactgcattatcatcctgatttcattcttctctggggctcttcaaactggtagcgtcaggcttctgctggcatccaggatctgaagaacatcttgaacaattcttaaacaaaagccttatgattctaactttggaaatcctatctatggaaacagtgggcatgcaaatcgtccgtatctggtgctatgtggcttttagttacaaggaaatgggccaaagggcagactgatgaatgcttaattataactgtatttctgttcagaacctgacatgtagttcttgttaaccctgtgaatacagtatcatagtcagagcagggcacaatgctgagtcatgtttttttttcttttttcttcctttaataaaagtaaaagagcactgtattaagattcagggcgggctgcagttgaaccaggaggataggcttccttttcctctgagggtttctcagctttaaagctggagagcagtttgatttccaaagtatttttttaactttaatatctaataaaatacagtttctttttcaaagaggatctccatgtagccacgaaaaaatatctactttcatatcaaaaattaaaaaagcaacataaaaaagtagcccaattcagaaaaaaaataggggaaaagattcatttgtgatgctcacacaaatgtatttctaccaggttgcagattaaaaacaaaggaaaaagatcttcaatcacagacctccttccgtctcaggagggtttcaacaactcaagtgcaaaatagagagatcagtaaagagagaggcaaccgtagacaaccaatttaataaccatagagactggtggggaggagggggatgggtatcagaaaaaccaagcaagagggaaaaagctgagtatggagatggattggggttgtttgctcaatgcctgtgttaataaaatttattctatcttttaaaaaaagttaaataacaaatgccaattattattttattttagcccactgggtaagaaaggttatataaattcttccctgaatcaggaaaatgctcaactctgatattttttatttttctaaaaggttcttttagttttcagcattttcatatgcactttattggcatttgaaaaggaatcagccaggcactgtggctcatactggtaatcccagcagattgggaggccgaggcaggacgattgcttttgagattagcctgggcagcatagggagacctcatctctaaaaaaaaattaaaaatagctgggcgtggtggctccagcctatagtcccagacacttgggaggctgaggtggaagggttgcttgagcccgagaggttggggatgcagtgagctatgattgcaccaactgccctccaacctgggggaaagaaagagaaaggagggaaggaaggaaggaatgaaggaagggagggagggagggaaagaaagaaagaaggaaggaaagagagagagaaaggaaagaaagaaagaacgaaagaaagaaaaagaaagaaagaacgaaagaaagaaagaaagaaagaaagaaagaaagaaagaaagaaagaaagaaagaaaagaaggaggcaggcagttaggaaaggggcagggagtgggtttagcaatgtgcaatgagcatctaataaattagagttgctcttcaaagaggatccccatatagctatgaagagttagctacccataggcgtatataagtaggtgtgggggagatatacaatacatggtgatttgaaggacacgaaggaagctcagagagcaatagtgtagggtaaatctctttcccagaaggagcgtggggtggttgacacacttctgtctcacagcaggactgagctaacacagcgtggtgtggcacaggggaagatgcgtgggtgcagccaggaagaaagaggtcaagcagaggccgggattcaaccaccccgacaataaaggatgacaagggcattgccggtgatcaaatgcctgaaggacagaatttctgaatggcaaagaagtaacatggagtctgaccagaccagaatatgggcaccacagggcccatgacagaagaccagaaggaaaaagaaggctaggccattcgatgttttgtggttttgtttatctggtttgttttcccatgcttaagatgttgaacttgtctgcagggctgggaaagaatagttctgaatttgaggatcaactttgccatattggaagtagtttccttcacttttttacttgctgggtcctatttggtgttcccttacataatttcaggatcttttcccctgtggaagtcaagttgctaccatcagcaatagccaatcctggagtggcaggaattcttgctgtacgtggtgacctagtgaccttaaagttgctatctgactactgggaacctggtaagcagcctccgcactcccagctgtccagtgtcctcactctctggtcttacagtctccaaggccccaggctaagtaggaacccagcctatgaataagtctcccaagggttttctggccccgaggttatccccctgagacaggtgaacaaagccttccctccttccagggttacttgtgaagcaaggagggcctgagtttctctcccaccctctcactccgagcagacattcaggcctggccttgagcctctacaccaggaatcccctccttcttcttagactcaccattgaacacaatgcttctctttcttcccggaaggtggcagcgcctgaaacgtctcagaaagcttccagcctctgcctgctgggcctcggcagcaatttggctttgtttcagcagttggatcacagttgagaggagggggttgcagggatactgacagggaagtccttctcaggacaaggaaggaggcctggtgaatggaaatacaaggcctacaattggagtccaaaaaaatagaatgttatcccacaggagaaggtaatagatgtcaggcactaaaagcagtaaatcatctagaggttaagaggggaatgagaagggagtcaaaatgtagcaaagatggatgaggaggtcactttagtgttcagggagaaaaaatgctgtgaccagtgaatcacagggaagacttgagacatatattatacacatattaatcacagagaatatatatatatatagtctccctaattctaattcaaggtacatatatatatatatatatatatatatagtctccctaattgtaattcaaggtacgtatgtgtatatatatatatatatatatatatatatatatatatatatatatatatagtctccctaattctaattcaaggtacatatatatatatatatatatatatatatatagtctccctaattctaattcaaggtacatatatatatatatatatatatatatatagtctccctaattctaattcaaggtacatatatatatatatatatatatatatagtctccctaattctaattcaaggtacatatatatatatatatatagtctccctaattctaattcaaggtatatatatatatatatatatatatatatatagtctccctaattctaattcaaggtacttaatgtcaatgagataatataagatatgtgtgtgtatttatatatgcatgttacttcattgagactctgtgttcttataatttaatatctaattcacagaatttttaaaggatcaatgaggtaaagaaagaaaaacaccaaaaacatgggtgggcatgcagttcagctacattcctcgctcttgtctcttcttgttagttgtaaatgccttgaaagcaaaaactgtcttgtccatcctggattctctagcacttacagtactgtagcttaataactgtttcacgatgcatgagactgccattttggatacagaattagcagaaggggggtcatggtgagagcaacaagtggtacagtatgaaaaagaagaaaatattattattctatttggtttgaaaagtagctagaataggcaagattgatatctaattcattatttgcccagtattgtgctaaggacttgatgtatatcaactcagtgaatcttgacagcaaccctagaactcaggcacaattttgactcccattttacagatgaggaccacgagacattaggaggttaagtaatttgcctaagaccacacaggaataagtgacacagctgggatttgaacacagctgccttccttcattcctgggctccaaatctctacaacatactatttctggatgaaatggtattatgcttatccaagacataaatgttttggcaaggttaaaacattttggaaaatgtaatgggtacttaactaatgttcctatatgagaggaaacaattatcaaaagctaatagcttaaggaatcatcacattttttattttttattttttaaatggaatcttctacacactaaggcatactgttatttttgagcagtcaacgagataagtatttagaagccctctagaacacaacattttcaaaacatctggaaattttgtgtgctgtaaataacattagtgattaaagtttggaccaatggattagaaaaataaatggaaaatattttaaatgcatatcctaaaacagttatctaaatcttactacgaaaaaaagatataagcatactaatgtttttgctttctgtattaatggtaaaattatgaaattacctcttttccttaattcagttgaagatccatttcccagggctatataattaatcataaaataacctgttggtaagattcacaatgaatacctgatgtggaaaaattattattttaatattttattctctatttttgcttattttattgatgtgcatattttacacacaactccaaggaattttaaggaggaatattatacaaagagaagtgatccactatttcttcactctagcattgggctagttactttatatacttctttcctgcagtaatcctaccttcattatatgaatgagaagagattgagtctgaggggctaatgaacttttctaaattcgctgcttgggggtgtgtatggaatgattctctcatttgactctttcaaaagttggtcctctttttactatatatattgcctttcattgttgcaacacatttaatgttccaaattcactaacacaatgaatattataccctattataatcccatcggaccttatggcctattattctatctgacaattggaaaataatagataattacagtgagatacattggattctaaaatttgcttcaagtcataaaaccaactagctacaatgtgaatacttaacatcacttcctgtgcctcccctgtcctttccatcacatgatttttttccatgcaaatacattataaaactttctattgcatgcaatttgccaccaattgaatcattttgtagttgtcaatgtatctctttcagaatattaaagaggcctgtgccatgttaattacgctaatttggggacattaactttataattgttattatactggttatacactgatgttaaactgtctgataaaatttaccttgaaaattgtaagataatttttccttcccgtcagttagcgtatgcgaaggcatttggactttccttataggcaatgggatgtccttaccgagcttatgggcaggccgtgatgggacttgacttgcgttttagaaacaactaagataaaagtatagatgacagctgttgggaaaagactctgcagacaatgacacaagtctagaagtcttttccaattatgtagataagagatgagcagatagtaaaggtggaaagttgtagaaagatttcagatactcgaagtgatgccataataaaaactagatgtgttattctgttttagagaaaagaggagagaaataataaattgagtttgggacatttaaagggctttctaggtaaaagaaaaaatagttgattagagactggtatttagaagatggggcctatggatttcttctccaaggtgctcagttatttttgctgtatttttccttttacgaatgttttgacctgaaaaagcaaaattgcctaggatgaatgagcacttgggtataagagaatcaccaatatggaaaaaaggaattgctgggggtggtggcacatgcctgtaatcccagctacacaggaggctgaggcaggagaatcgcttgaacccaggcagtggaggttgcagtgagccaagattgcaccactgcattctggcctgggtgacagagtgagactctgtctcaactaaaaaaatttacaaaaaaaaaagacaactaaaagttttcccaactcatggtagttaagtgtgtcattttaacatataaaaattcgtgtttaaactagacattgctgaaaaaataattcactttccttgagagaaagagtgttgagctatgagtccaggcagcctttttataaatctcctgattctattgagtaatcaatgaattgttctgagatagcctcatctttgaattgaactaataacattatcagtctcataaaagatttaataacaattcatataagcagtagaggtcctagcatgtaatacatgcccccagaacattagacaatattatttattatttctcagaagtagaaatatatatttagctacagaaaatttttcaaacctggctgttatatacataatatttataacatatagatttgcttgaatttatagtactatcttaaattataaatatattatctgcattgaatattggtatagggatccaatgattataaggtatattgttgttaaataacataaataacatagagtactttatattttcaaaaattaatgcactgtttgtctttacaaggcaaatcttgacattctttctcaatttggagaataaaaaattatcaggcttttcaacattcttctacaagttaataaaacagaaacaaaaggagacttgtgaaagaatgtcaaataattagaaaaatgtacaatttattaatataaatgtataaagcaaatagaacacattcatttaagctagacagacgtcgacacaaactttcaaattggattgtcagtttcatcaaatttggaataaacagaaaaatacagtatttacagattttagtaaaactaaacagaaatggtacaagaaggaaatttatttttcacagaacaaaaatgacaattttgactcaggtacccacataggagcaggtgaagttctcaaaggacaactttttttgttgttgtttttttggtaagcaaatgaaaaccaagacatatttttctgctcttttatttatattgatgaaacctcaaagtctgtactcaaatacttattaaaatatatccatacatatatgatttcttgtcaaaatgcatcattcttcttcaaatacaaaaacaaaaatattttcactttcctaaaaccatcactttttcttagatcacacttttatctttcttctgagtatagccctggaaaagcagtttgaatgcaaagccccttgacaaaatatctgctttttaaaaatgttaatttaatacacaagaaaaaaaaagcctctgggagaagaggataaagaagttaggatttctaactcctaggctaaaaaacagcatatcagaaagccattcaatttcctttacaatgctgattaaagccttcattttaatcttcattataaatggaggacattaatccctaagctgtttttaaacaattaatagtaaccttcttcaaccctatccatgatttccctgaaaagcaatagttgagttctatttattcagtgtaatggactggcatttcattttaaataaaaccatataagcatgtctctatgtgagatataaatgttacactcatctatgtacataatgctatgtcgtggagaaattacagtagtaaaataatgcagtctttagcaatgtcattttgaagtaaatgataaaaagagtagatgcttgaaccaccttagaaaacaaattactatactttctagaacaatcaaagcattgggtttaatatctcattctgctgaaatagcttatagaatcataaatagctgatgcacagttcctgtaattaagattaggcagttaagaacagtaaatcaaagtttctttggggtccattttgagaaagtaatatagatttttgtcatttgcatggctttatagtaaagttaaaaaaacatacacaactacacatactgacttctggagtagacgctcggtgacttctttccggtgtgataacttttttgggttgtgcgatgggaaggtatcgagtatctgtagctactgctcttttcgttgcaacaaaaaacgcagcagaacagagctcctccaacaatcagcaccagtgccgtggtccatcctaagtagagagcttctccaagctcacgtttttgggcaacattcactattgagttatagaaatctctgatgatggcattggcaacccagctcacagggatgagcaccaccatgcccgtgatgatgaagatgattccagccgtcagcagaatgtgagccttcaccttctcattgtcccccgtgcacctggtgcatttcatgccaaggatggccatcatgaaagccaagaaggacatcacggaagcagcacacatcagtcctctggctgcctgtaggtccggagaaagagccagcagggaatcatagattttgcactgcatcctgatgttagcctgcctcacgcaattcatccacagtccttcccagaagttttcaaaaaccacgatgttgttttcaatgaaggccgacactctccactgaggcatgacagtgacagccactgtgcccaccattccaacaccaccaagaaacagcccagcgatttctaaggcatgggttgccattatcctctgggatgagttttagccagctggactccggaactgctacttctgctttgaagcagggttctctgtgccacagaagagaacagtttttcctgtagtaatgaactcggaacccagtggtttttcaaataagagctgctttgctacttctggccagatagtatccagtgctggctggctgagatggccctgctattggctgcaacaggtaaacttacaaatcaggtgtggcaactttctcagccaataaaaggtggatggtaatccaggtgtgtctaaaccaacacttgggtacttggaacagctagacctgcacataaacattctttatacttctcggtcttccaagaagacagcagtatgtttacctgtaggcatagttataagtggttgcataagcatcaagaaatgagccgatcccttgtaatgtgaaaggtgcaccttgtacaggcaattctgaaactcttaataagagctgctgggaccaagggataaaataaattatctgccgaagaattctgcaacgctgttgaaatgccaaagtgaaacgagagtaggggattgaaagattgcttttacctgggaagccacattctttgggacacatgtgatccaagtgattgatttaatttttctacaacttcaaagcaagctctactgtggtgaaatcagggaacagatcatgccagaggacaaaataagctaaagtaattaaatacacaaggctgtccttctccttggcactgaaaacatattggagttctttaagccagaaaaaatactcattgacacttttctgataatcttcacttataaaaacattttttgccaaaataaaaatcaccagatgattatcttatgtatccagcactatagcattaaaataagcttatgagcttattttgtggtgttattcttgctgctttgaattcctgggctgaaggaactagaattctgaagatgacacaagacccttgggcctatacaaatggctgatatttcaaaataagatatttacaagacaagggaactatatttaccaaactgtattatattaggtattaaccaaatatgttttcctaccttttaatattatgtctgcagtaggacatagaaacccctaaacgcaagacaatttgaactttcttctcaaaataatgatgctctaacagtagtgctatactaagcataaatgtttatctgagaaaattcgactagcaattttcttctggagatcaccttaagctctctgtctgatctttccaaagtttaagctgccacttcattttcttttcttcttaacatcataaaaaatgattttctctttacagttttactttctctctgtttcattggactaccttaaatccaaatatgggagaaaatcgtttctgctcactgattaaactttgagagtttcatggttcaaaaaatctgagtcatttgtggatattattaaaacaaaaactatatggtagaaagggcaaaaggaggatcaagtagactgtcttctaaaaaagaggcaggacagacgcacagtagtatgagttgttataattttgttaaacagacgttataaaccttataaaaagttaaaacttaatatttacagaaatattctcatttgttgacctgtgaggtgccaaacttcagggtgtcccttaggctgatgcagaaaatatgcagcatttggccggggcggtggctcacgcctgtaatcccagcactttgggaggccgagacgggcagatcaagaggtcaagagatcgagaccatcctggctaacacggtgaaaccccgtctctactaaaaatacaaaaaattagcctggcatggtggcgggcgcctgcagtcccagctactcgggaggctgaggcaggagaatggcatgaacccaggaggcagatcttgcagtgagccgagatcgcgccactgcactccagcctgggtgacagagcaagactctgtctcaaaaaaaaaaaaaaaaaagaaaagaaaatatatgacattttcttcatcaagtttctatcagttacagatttgtggtggagggagacttagattaatcttgggaaaataagattttaaaagttgagattttaaactttcaaagtttaagaagtgagcagaaaacattttctcccatatttggatttaaggtagcccgatgaagcagagagaaagtaaaatttcaaagaaaggatcatttttatgatgtgaagaagaaaagaaaatgaagtaaagcttaaagattttccttttgtgcaatccacaaaaggaaaaatgacatataaacagaagatatttttcatctttaattgtcaaactgggaaaaaggagtgattgacagaactgaaaaatgaaaaagaaataatataactggttgagataatgactacgtgaagctacattttaagggatgtcaaggcatatattgcttcattgaaatttcttttcgaattcccgtgtggcatgtttcttaggagctctgtttaaatattgctgactatccacatcaacacaggaacgcatgagacagaagcagaaagctctgcctctgagtgcctcagccgttgtgggagctgcttcccaggtacgcattcatatttcttggctttgtgtattaccaaacctctcttcccttgaggcttgaattttaccaggaacttattttacataaaaatattttccttatttcaaaaatattaggtactttactattgaaattgttctagccaaaagatgaggatctgagtgggaaattaacactaggttcacattagaattattgtacagttaattccctactaggaagtggcccagggtttccaaataggttccttatcagacaatgatacagttaactccatagtatttataaataaccatgtcctaaaagacactggaataaaaagacagaaaaaaatggtaatattgagtttgctaaagacaaaaggggcctaaattcaaagataaaaggaaactgttatctacttttctgtcctgctgaattgattaacttggctacaaaattcagatagcagtaatagagatataacagattgataacatttttactctaatttagaactacagagcaaaatacatcgattattcaatagtttgtacttccatttccatgaagaaccacagtactaccaagaacccaggagagaaatgagagctcatgtcaaccccctctccaccctccctcgggcttttctgtctgtcaacatcatcataaggcatgatttaagtttagcaattaaatttgctaaactgcattcagccctgataatagcataacacaggcaaatgctttttcttcctaaatgataacatacaaatcactatcagattgtcttatgcccattaatccttaacctaattcaactccacagtcttggatttctattaattcttatcactgtttgaaataatttttgcttctgcctatcaagcaaaggtcaatttcttttgttttctggatttgctttgtagttttctgttgtgatgacagtttttcaagggtgtttatttttaactatgttccactgttaattaaccatacttggccaaccatcttgtcctgagagaataagtgaacatatcaataggtctctgtgttgttccgaaaatactgttgtgcattgctgtatgttctcttgaaccatcatcttgtttgtttttcatgatggccagctatgcttccagttctctatccattagcagccctctctttttaccatgtctctcttttttctttttctttttttttttttttttgagatggagtctcactctgtcatccaggctagagtccagtggcttgatctcagctcactgaaacctctgccttccaggttcaggcgactgtcctgcctcagcctcccgagtagctgggattacaggtgcacaccaccacagctggttaatttttgtatttttagtagaggcgtggtttcaccatgttggccaggctggtctcgaacccctgacctaaagtgatctgcccacctcagcctcccaaagtgttgggattacaggtgtgagtcaccatgcccaaccgctcttttcaccacctctgtgtgatctattttcagttgctctgcttaaaaatgaactccttactgcatagaaattgcctagtatcttagccaattcaagctgctttaacaaaataccacagaccaagtggcttgaacaatggaaatttatttctcattcttctgaagtcccagatcagggtgccagtgtcactgggttccggtgaggacccacttctcagtttatagaaagctgtctttatgagatgacttcacatagcagggagaaagtgtgagctccagtctcattctcttcttataaagacactaataccgtcatgaagatttcactttcatgacctcctctacaactctcaaagtttcactctcaaagacctcacttccaaatcccatcacattgggggttaacatttcaacatatgaatttagtgggtacacaaatatccggtctgtaacatctagctactaacaaattcaagcaataaaatttgcataattctgaagggtctactggtgcttaagaacttcacccatattatatcacccatatcaatatttcatttttccaagatgaaaaaagaatggtgaacatgaattaaaaaatcaataatagaaatagtgtcatggacatgtttttacctttctttcgcttttcattgcattaaaaaaattaaaacctaagtataggatgaattctgatatattttgaaagacaggtctgtgtatttcatgtgatatatttgatgtctctactaaagtactggaaatccagggagataactgaaaaaagcaaaactgtatactgtggaaattttcctataaattaatgagtaatttatatatggagaattgatgatgtgaaataccctaattctaatgatttcaggaaaaattttaaaaaagaaagaatttgctggtaatagcagctactgagtattaaatgttctctatacaatacattctttttatcactctactttatacttaaaacatttttagaaagcaggggtcattactctccttttataattgaataaattaaaactcaagagagactgccttttttaaggccacacagactttgctggttgaatctacagaaatggaattcagaagcagacctaaagcccacattcttttctgtattgcctaccatctccttaaagagaactagggaaacagaatttcttacattggcatatatggtcagagttaattaagatataaaatatgttcaaaacatttttcgtccttgcttagcacattgttgtaaaaattttgcatggccaaccttcgcaatttttaaaacatacctgcttcactgaaatttgaaatctacctctttagatactctattcaaaggagtttctactggggaaatattggcaatttcaataaaattattccttgtttagaatttgagagagttccctgtgctgaaggtaccagtggcacccctttttccttcacttcccatgcttgtccccatcttcgtgattccttaattacagactaggtcgtgatactgaatgacctaaccaccactgaacaagtatttggctaaagtaagcattaaactatttcaatgcaatgaaagtgaacagttacatgtgtctgtgccctcagctaattataatacagagaaactttcctttgtattttatagggacttcttagtgaccaacagaggaatgattctatggttaccttcattagtccattaaaattgctttttcaggtgactcactaacaacttttctttttaccttttccaaacgctaaaattaaaaaaaaaaaaacatttttaagttgtataaaactgttttccacatggttatttttggaattgcttgaaaaacaaattttttaaaaaaatcccttaatctcccataataatcctttctactgaaatgtaaagcatatgaagcattgaatgaggagaacaaacggtccatgacaaaagtttctggccaggcagagactgtaattagtactaaaaatgataacatcagataatgaacaggaccaaaacagagcacttttcataattttattttgaatccacagcaattcacaagtttaagtcatgttaattataaaaaggaagagaagagaaaaggcacataggataatagataatatatttaatatgactatgcttaaaataatatattttaataaatattacttaatcctagtcataagaactacttaataattactaagttatatgaacaattaagattaagtgatatcatattagttaaccatatgatttcagcctcccaacgcccttattagaaaagccctttattatgtcagttttactaggaaactggaatttacaaagtttaaataactgacccaaatcctcacaacaaactggtaaaaaaagccaatatgggaactctattctgtcaaacacctgaggctacactcttgacccactatgtgctacaagtcattatagacctacctgtaaacctaattgaaagcttgtgtcaatgtgtagttttatctcttataaagcatataagttttggtagatcagaaggagttctctgaaacaatgtccttcacattgtgaattttcaataggattttgagcattataaggagaaatgaagtgtttccattttctgcagcaacatgcattgtttaatatgagaaatcataagatatgagggaaatcataagatataagggaaaagtccacacaaatggaaaacacatacaagggtgcacacacacacacatacacacacacacaaaatgtccttataagcaaacaatgaatataggagcacaagaaacaatttcccttgtaaagttgaagttaacaggacagggaacaggacagggaaaagtaattaactgggcaaatagagctaagccacattactgattaatttgcaaaacaattaactttccacttaaaattcaaattaagattctgtctgccttaggcaaccagtgtttgcaaattttaatagggctagacattaagtgccttacttaaaaccaactttacatggcactgggtgagaatattattggaacaagcagctcatggcattcttgggtttcagttatttttttaagagaaaatattacaatctataataatatgctggatgcactaaaattttttcaatgagaatatgagtaaaactaaaagttattcaactcctcatctcaaatatttatagagattttgtactttctgtaaaattttcaagacgatgtctcataaaacatcttctgaacacttattttccaaccgttcaacaagtatactatgtaccaggccctgtgatagactctggaaaccaagaaatatgaggcatagtttcttttctttgtaattttacatccacaaaactgaggggctagtggaagaaagaactgctgagtcaattaactctgtcattggttaaacttgttaaccaactattcttttcaacttgaaaaagcatacaagtagccacacagacaggtgagaacagccacccttcactccattgaaaaaaaagcagcttccagggttttgatgttttctaaacaagatcaaacaatcaatgaaaagcaatgccaggagtctataaacattcagcagaggtaagctggctgtctcacattttcacacacctttctggttcatgcagctcctatttcttgttcttatctttctttttctctgacctacgttccagatatctttagagttgctgctatggggagctgtatgtgattatctgactggcttctgggcatctttttcatagttttaactggacttttgatgtctcacactggacaacaacattctatttcattcttatgtcaccaaactggttggtcccagcccacatggcctccttcctggtcacgagcttggaacagggaaacacaagttacttttgtacatggcaacaggagagaatattagactcaaaacagatctaaaagaacatctgatgtgcacttcattctgtacatgaggggctcaaaagctccaggaagtcaggaaccacctctgttctattcatcttcgtgtcaaagtaaagtacttgtgtagtgcctggcacatagagagcactcagtatttatctaataccacgcaaatcacgctgaaatctctgtgcccagttcttgatatttgcttggtaactcggaaactatgacaccgtagacaagtaaactgcctattgcttatttatgtatttgtctttttaaaaatctcctaaaatagaatataaatatcatgagccacatgattttgtcttgctcataaatgtatttccaactactaaaacatcacctggttcatagtaagagctcaggaaatattccataaataaaagaagaatgttagttaagaaaaataacctatgtacccagtattgtaaaaaaaaaaaaaaaaactctcctatatataagttatataatattttcagtttattttttcaggtcgatgcttaagcagagaagagcctaaaataaaactcacctttggctgtatcagcccatcactatgcctctgaatatgccttcttaagaggtaaacttatgtcccagtgggttcatgaattttacttcagctttctttaagtttcctaagtatgccctgtgaactgaccttcattttctcatttattctatctcatttctctcttctcagtatgcaaatcccatttttccaatgcttgctattattaatccaatatccttccaattaccatggcaaatattgatggactaagagcctaggctaccatttttgtttaatatataattttactataccaaggaatcattaattataattatttttctctaagtatattaacacaaatacagacaaatacaatatagaataatacataactaataaaaattaatacacatatacttttaaattttagaaagaacttacatgtatattttatgcaaataacttatatgtatgttttatgcactttctcattgaagtaagatttattttgctgttactttttaggagatgtttgatatcctagggaattttagtgtttttttgaccatcgctaaattggaattcttattagttaatgatgttgctaggaatggaatttcatttggaagaagcattaagctacttaaatagcaatctcaactgtatcagcctacctttctcaatttgccttgtgatttaatgtaaactcggaaaagggagagaacttcgactacaagtaagtgaatggtaagttcatcagctagccattattggtggcttctttggcttccaaagaagaagttaacttaagtataaaccttgaatctgtgacttaatgtggaaataattagaaatttgcatggattaccattgttcctgtgtttcccttacttttcaatcaaatattgtttcaaatttcatgctagcttgaataactatttttataataagcaaaacagaaaaagctaacttaaatatatgtttattatatcaaatttttgataatagctatcccctggatagtaacccagatgtgtctatgtgtttgtgaaaagaagcctatggggtatgatgtcatgaaaaatcgctttcagattttgctgcgtattctgctatgttggtagaattcagtacatgagactatgttcacatagtacaaaaataaataacatatagtacaattttgcatataacatctatctaaattcaaatatagttcttatcattcacacttgagatccagattccatttaaataatatttattaatcttctatcacatgcaggaaatgttacatatattactgtaactaaattaggttactcttcaacttggcaatgaaaaatcccctttggcatagactttgctattaaaaaagaagttggtgcaagttttacaaaagaagggaaatttttcctggggccattcatagttgacactcagaaattatagtggaggaacacctagaatagaacagattagaagaacaagcagctgcatttccatacctccaagctctattctcacagtctgtaatctaactacattgaacttcactcatctacatgtttgttatttctacagccacactttaccatcttgactctagggttgaaatcccaactactatgagccttttctttcagacactggtcattttagaaaatgtaaaatcaattaaccaagttcaattctgaaaatctctcgagtgcattttccatgtagagagagagttctctggcataaataggttcagtaattaacagcttgactcaaatgtcattttgaaggattcattaattcacctcttctttaattcatcatatgttgattacttagtaactacagggcaggctctgttcaaagtactggagaccagggccgggcgctggctcacacctgtagtcccagcactttaggaggccgaggtgggcggatcactgaggtcaggagttcaagttgagaccagcctggccaacatggtgaaacactgtctctactaaaaaaaaaaaaaaaaaaaaaaaaaaaaaaaaaaaattagccgggtgtggaggtgtgtgcctgtagtcccagctactcaggatgctgaggcagaagaatctcttgaacctgggagatggaggttgcagtgagtccagattgcactactgcactccagcctgggcgacagagtgagactccatctcaaaaaataaaaaaaatgtactggagaccaaaccacgaagaaggcacagttcctccctcaaggagcttgcaggctaatcaggggagaacagttgcttcaggcctgactgccatttagaaccagcctttcagttgagcataaaaatcacaagatttgtgacaagctgttccaaacacaaatgcctgcagggactagggaggaaagagaaaaacgtaaagcaggacaggtaaaaattgtgtttgttcctctaaatgaagcaaaagctacacaaatgcagttgattttggcctcatgggagtggactctagtgttactggatctttccattcttaacaagtcagaaatctgtatttttttaaacccttctttgtttaatgttgccactagtatggggtttgaacaaaacatgtgggacaaatttggctcaaggttggccagtttccatgtgtcaaaaaccagtgacctctagatatcaattgccatcaggaaagctccttatttgaatgggcactgaacccagccatgtttcagatcctcagtcaacaacaggagagcagaacctgctgcttccatggaatgttataagaattaatggccctgtgaaggacttagatctccttggataaaggaactgtgcaagtaaacattgtaatcagtaatattatgttgtactggttgacccaaaccatggcaggtcagttctgcatgttacatacagtggtggagaaatcagttagagctattcactatcaacttctagaactttcctaaacacctgtaatttatctgtaaattacctagaagagtttgtaagtctcttcagaaaaatgcaaatctgatttctaaaaccgtcttaattttaaaaggtaatcttaattatttaccaactactcataaaatttttgtgcggacttgaagtgcagttaagtatgagaaaaggagattagctggtacatgcacacgttctgtaacagaacacagcctgtctgctggagagatgacagtgaatgagtcccccatcctgattttcccacagcttaataacctccaaaacaaggaagtggacatagcgaaactggtctccatagattcacttttcccataacagagattctattttaataaggctgttagtcagacaaaacccctattgacctgtggcagcacattgcatgctttctcttgtttccccggttttaccagtgcttaggaagcaagccaatatcaagtgtgggtcaggctagtagctggagatatgccctgtgactcatctttatcttcagtgtgcttctttgaatattgcacaactgcccatgacagagacacattttaaagggatccagactactcaggcttgaacagaaaagaaaacctagcatatgttgaatgaataatacaatccaaaccagtgattttttaaaagtctcctctcaaatattatgtatcagggatgtaaattaatcaagactgcctttcccccattaaaggtctgtgaacaagttggggataaatctgaataactacatatgtagttacaacagatttctgggatctctgccctgattggaaacagttttgtctatgtcccatgttataatataaatgtaaatagaagatgttggcccttgagtcaaacataggattcttgagcatttcaattacaagcactttgcagcattgctcccttgtatataccaacttgagaaataatggctctgccccaagtttaaaaaatatcaagccctgggaagaaatttgccctataagaacatatatatggctactttcaccttatgataacaggatgatgtcaatcacctattaaaaataagtagggtggacgcaacggctcccacccataatcccagcactttgggaggccaaagcaggagaattgcttgggcccaagagtctgagaccagcctgggcaacatggcgcaaccctgtctccacaaaagatagaaaacttagtggggcatggggatgtgcacctatagtcccagctactcaggaggctgaaatgggtggatcgcatgagcctgggaagtcaatgctgtagtgagctatggttgcaccactgcactccagcctggatgacaaagcaagaccctgtctctaaaaaaaataaaaaagtaaataagtaaataaactcagctagatagcaaaaaaaaaaaaaaaaaaaaaaaaaaaacccaaacctcataagctcttttgctggaatttgtcacgtagctggagatacaaagtacccagtcttggaaaagatttaagaactatgtttaagcttgccatcaatgtacaaacattaaaataattagaaattcacatggcaaatttgaaactaaactaataaaaagaaatttctggtattttctgccacaattaaattttaaaatatggtaagattgatatacataatactctcgcttaggatctggtctattccaaatagaattgttctcacaatagcaatgtattttatagtgaccatacagtcatgatgatcatcaaagggacaataagaatacacagataaaaagagtacaatgggattaaacagattgtgtttcatagattcatttctgactttcttgctagtaatggaaaagtaatgcagacttacttcatttccaaaacagagacttagttatttggttacaagctcattaaaataccagatttattatcatgattaatatatatatatatgtatatatatagtatatatataattatatataatatgtatcaaatatgtaattatatatacatatagaggatattattaaagtgattgacagttaatatttgaattatgtctctatgtaaaattgaggtttgaataacaccttgatttgtatccagtaatttgagttgtagaatttattcatctaagctctagagaaaaggctgccatctactgaaaaattagggtgtcttcttggagtccaaggatagtcccgagaaaactctactaccattgtggccattactttttctaaaagctacaaaatgaaaaatgaggtaccatgattattcccccggcatttaaacaaataaggagagggatgtatgtgagacggaggggcaaacacgtttggtgtatggagggttcaccgtaaagtgaaggggtgagggttggggaatcactcaataacagtacttagaattaccaagacctgaaatctgggaaaaaattggttggtggactaaaatataaacaagatgaaaacattgagataaatggggggaaaattagaagctctgaaaacagaaaccacagaaatatagatgggagagagaaagtgagatagaaatagaggctaaaaatagggaggcattagtagttctgaagaatggaggtatacagtttatctgacaccttccagccctgtctagcatgtccttctgtactgcagagactcatgagtgacatatttcacacaatgcctttcaggttattctggatactattttgacttcaaatattagttacatttgcaagaaatttgttttgaccctgagttacatagaaagagaggatggtttcagcacgttcatttcgttgacctggatggtgacagaggagccatgttcctggagccagcagctttgttaatggttctctgacatggaaagaagcttccagatacttcaacgtttacatcatggtagaagcagtaccttctgggttgtccagtattgcttgtggttttggggattattcctgaaggctgaggctagtctatttgttcactttccccaataattctatgaactgtatatttgtttggaaatacttttctgtggacactaactagaatggattcataggtctcagtaaaaaaagttgactggtacagaaggaaatacactatgaactgtatatttgtttggaaatacttttctgtggacactaactagagtggattcataggtctcagtaaaaaatgttgactagtacagaaggaaattgttgagttggttgggacaaaaagagatctttccatttttcatatagtattattgaatagggctgtgagcttgtttctcactcagttgtggaatgttaactgattaatctcacagggattcttcagccttaaactcttattagtgggtttactttgaacataaaaatattcatatcctattagcagacaaattcattaggattcatcaagatccaaaacctagtcacataggaaacttgatgaagtcaaaccagcatgacaaaacttcctgcttccaggttgacccttaacattgataacagcttttgctttattttgtttctaaagatgatttcaaaagcaatttatggtttttactgggactagagtttcataaaagaacatggctgatagtgggtcaccaatctgaatgcacagtcagctaaagtagtagggaaaagctaagtgcagtcagaagcagaaacaatgatttagagctatatgggtcatatgaggcggaggaggtaagaaaaatgacttttcacaatatgacaaggaatacaaatatgcagaaggaaacagattctctaatagatgattaaataaaatgaatgcagtatgtgctataaaatttaaggtaaacaataattattataggtctattgaaagaaaaataaacggaaagctgagaaatgcattgagctgaaggactgagcagagccagtcccagcagagccagtaagcccagcagagcccagcagagccagtaagatacaaaaggccaggcatggtggctcatgcctgtcattccagcactttgagaggcagaggtgggcagatcaccagaggtcaggacttcgagatctgcctgaccaacatggtgaaaccttgtctctactaaaaatacaaaaattagatgggcacagtggtacgtgccagctactcaagagcctgaggcaagaaaattgcttgaactcaggaggcggaggttacagtgagccaagagtgcaccgctgcactccagcctgagtgacagagtgagactccatctccaaaagaaaaaaaaaaagttacaaaagaaagattctaagcaaatgcccataaaatgcacaagtgctttaagttgaaatcagtatgttgttttctaaggcactgtgcttttaggaaaaggaagtgaaaaaaaggtatctccttgttaaaatccacaagtttcttagaagtggcaatttcatggaggcatcacagtactccccttcaaactatactataaggctacagtaaccaaaacagcatggtactggtacaaaaacagacacattgaccaacaaaacagaatggagaacccagaaatgaagtcacatgcctaccaccatttgatctttgacaatgttgacaaaaataagcaacacagaaagaacttcctattcaataaatggtgttgagataactggctttgccatatgcggaagaatgaaactagacccctaccttttaccatatacaatcatgaactcaagatggattaaagatttaaatgtaagatgtcaaactgtaagaatcctggaagcaaacttaggaaacaccagtctagacatcagccttgggaaagaatttatgactaagtacctaaaagcaattgcaataaaaacaaaaatcaacaagtggacttaaccaaaatagagagattctgcacagcaaaagaaactgtcaacagagtaaacaaacattctacagaataggagaaaaatattcacaaactatgcatctgacaaaagtttaatattcagaatctataagaaacttaattcatcaagcaaaaaacaaataactccattaaaaagtagggaaaagccatgaacagacacttcttaaaagaagacacgcaagcagccaataaacatgaaaaagtgctcaacatcactaatcaccagatgaatgcaaattaaaaccataatgggataccatctcacaacaattagaatggctactattaaaaagtcagaagacaacagatgctggcgaggctgtgtagaaaagggaacggttatacactgttggtgggaatgtacattagttcagccactgtgaagagttcactgaagcactgcctacaatagcaaagacatggaatcaacctaggtgcccattaatggtggattggataaataaaatgtggtacatatacaccatggaatatgatgcacccattaaaaaaatgaaatcatgttctttgcagcaacgtggatgcagctagagaccattatcctcagcaggaacagaaaactaaatgctgcattttctcactcataaaagggggctaaacactgtgtactcattgacataaagatggcaatcatagacactgaggactactagaggagagagggaggggtgcaaggactgaaaaaccattgggtactatgctcactatctagatggcaggatcaatcataccccaaacctcaggatcaaacaatatactcatgtaacaaatctgcacaggtaccccctgaatctaaaatataagttaaattacaaagaaaaaagaagtagtatcaggttctcagtcactgcatggaagataaaatagatctcacatgggaaatccagatcttgctgaagacatccaagtccctttatgttctataatttcaataacagcttccaatgtgggagctcttttacctctgggaacgttaacccataaaaaaatagagcagaagtgagactccaatctttaacctgacacagaaacttcttgtaaaagtcagtaggccttgaaagaaagttaatatgccacagaatttggctttatggctttgatggtgtgtgaatacatttaaatgaaaagagagactgtcagtggcggagaagctgaggactaggaaaaggacaccatgttgccacattagtatgtgatgtaattttttccatcactattttcttagacacaatattaaattgtaatgttacttttatttaagccaatcagtattacatattgtatgatttaatgctgtaattcaactcacctttcccaagaagatagttattaatgtaatgtttaaattgttatcactctgtgtacaattataaagatgatgttattcttattttctaacaggaggaagactttttccagccaagttactttagccatttcaacccctttctccttaatgggaagcagatggctattgattgattcctgcagagaatgttgaaacattagatccagtagagaatgccaaagagctgcagcaattcatgggtaaaagggagagtttttcagagatattacagggaagtgttattttttatcttccatctctcaattaataaagatttgagcaaatacataagccatgaccaaaatttaacaaggaggagcctgaggatagcagcagaaaccccaaagtgattaagtgaaatgagaacagcatgagatttagcagggaaaaagtttgcttaattctaccaggtttaaattcttgccagttccttgagaaggaggaaatgaagaaggattcaatgttcctctaggtatcctttacagggctgtattcgatataaacatgttttattgcaggcaatagagcaaatcaccatttgattagggtagagagcagattctatgccatcagtgccttgaactttgttcagtgccttggacgttgttacaagtacagatgtgttgggttacctctacttgctttatagaaacaaaattttctctaacataccatagatgtaggttgaaaatgtacggttatatagccccatcactctgaactctatgtttctatacctcatccaatacaatggctcagttctctccctgggtccctgctcttgattatgagaatagtatgtaattaattacctttaggagaaacataatgttttaattcactctacaaaaaggattctttgttaataaaaacatagatgcactttactattactactgttaccactagtcaatgtcaatggctactgtttattaagaacttactttgtgacagtcattataatccatgagtgtacattaccataattggttaacacacctccaggtggtaagtatttttattattagctccacttacatataaggaaactgcagcttagtgaatttaagaaacttgctcgaggctacacagtttgtaagtggtgcacatggtttgaacccactgaatcatccctttcattgactactttgttcttccagaggaagcagtaacttacaagtaattcaaagtattattgcttaatcaatgactaatctcctgaaccaactttcagatattaaacacagacagatatacagatgtcttttcacatagctatgttttaatcttggaaagaaatataaatatcccatttcgtcctcataatagctattgaggaggatatgataggttttatcatgtaaaatttatcatggggtaattgaagctcaaagatatataatctgtctaaaattacacagctaatatttggcaaagcttgagtcttccaaatttagacatttttttttttttttgccaatccacaaggtttacccaagatagtcttccaataaaactatgcccatctgtctcaatccctgattgctgacctcctgagatatttttaaatcatgaaatgctttcaaactgattagctagtatttataaactagtgagcactaaccacctcagaaaggaatttgagacttgtcttaaacacggaaatgatcaggtcattgccatcagtgtggtccctatgatgacagcagtatttagaaaagtatatttcaaatgtttattaaagtcatagagaagaatgatgtactttacattgcatctcatttgtcaagagtgattatgatctgagctttgcaaatcaagatcattgatgaaatggaggaagtaatcgatgtgaaaaatattctgcatgtttatgtgatcaaacaccaaaggttcatggttttacttttcaaaatgagcttctgcatatgggcagaagtatacagtacagtggtgtgctgacagtaaggatgaggggaggtgccagggacatatcagggacatatgtgtctgcggagtgacaggaaatacctttctgaattaccaactttctcaaaaattgaggagaaataaaactaaattactgaactggtgctataagatactcattagagtattgaaacaaatacacaacatgttagaatgaaaaaatattgcatcaattacaacaaaataagacatgggatttctaggagatttcatgactgcaaatgaaggtgtggctaaggattcacctgccatctctcagggacatgtctctcttggcttttgggagctatcactctggaacccgagaactaatttagggaaaatctggaaaagattttagtagaggaggaagctttgtttttctttcaataaagtcagtgaaccaggacatggaaatttctgggaagacttaatgtgtcaatctaaaggaaaaactgaggccaaattaatataagtagagagtttatttgggccacgtttgaggactgcaacctgagaggatagatgcaaattgcctggaatatagactctgattagaaacagttaaaagtgagtttaaaaaatttttgtatttatgtattttcttgagacagggtcttgctctgtcactcaggctggggcacagtggtgcaatcttggctcactgcaacctcccaggttcaagcaattctcttgcctcaaccaggcaagtagctgtgattacaggcatggaccacctcacctggctaatgtctgtacttttagtagagacagagtttcaccatgctggccaggcatgtcttgaactcctggcctcaagtgatccgccaacctcagcctcccaaagtgcagggattacaggcgtgagccaccacacctggcccaagtacatttttaaaagaaaagaagaggcagttcctaaatgtttttttatttttatttttattttttttgagacgtagtctcgcactgttgcccaggctgaagtgcagtggtgtgagcttggctcactgcaaactctgcctcccaggttcaagcaattctcctgcctcagcctcctgagtagctgggactacaggtgcgtgccaccatgcccggctaatttttgtatttttagtagagacggggtttcatcacattggccaggatggtctcgatctcctgacctcgtgatctgcccgactcggcctcccaaagtgccgggattacagatgtgagccaccatgcccagcccctaaattgtttaccaagaatttacatgaaaataacataagctattgattgactatatattgttctttatctcacaaattccaggaacatgacaataatggacagggcagccagtcaggaacaaaatgactttaaaccattgtccctgagcatgggtgacgagggagaaaaacctgactgaggtcccatcctcatgtctctctgggcttaataaatttcacatacttcacagcccagactgctctcagtggttttgcttttcttgtaagcatctctctcagatgagggactttttgatgttacggtgttctctgagactcccaatgactccaaagtatttaacctttccagctaatattaaaagaatctgaagagacagcattaaaaactcaaaggtaaaaaaaagaacacttaccattggtttattcattaagttcagatttttaggacccaactggatagagcagatggcaaatggaggtttcactcatttaccactgctgaactaccagaagctgaatggagttatggcttatgaaaaactgcttaactattttgtgaacccaaaccttcaactttagaaaaattcagtctttaatgcatacatacctaagagcatgtctaaattgtgaagcatctgtatgacgatatttctttttcttttcttttcttttcttttcttttcttttcttttcttttcttttcttttttttttttctgagacagagtctcgctctgtcggccaggctgaagatcagtggcttgacctcagctcactgcaagctccgttctgcctcctgggttcatgccattctcctgcctcagcctcctgagtagctgggactacaggcacccgccaccacgcccagctaatttttttttttttttttttttttttttgtatttttagtagagacggggtttcaccacgttagccaggatggtctcaatctcctgacctcgtgatctgcccaccttggcctcccaaagtgctgggattacaggcgtgagccaccgcacccggccctgtgtgactatatttctaaagaaaccgagcagagagaaaattttgaccaagacaaaacatccacacaaagtagagatatgtaaattgaatacaaacttatctgaaacttcagtaaatgctttcactctagtttgcttcatgagaatacattggcttttctgaaactacaggtatgaaaaatgacaatctctgtcagcactgtgcttctcgattgaactgacaggcctaagctgaatgcactcaagtttctctagaatgactccagtaaataaaagttacagctctgacttgattagtaataaacactgactagaaggctccctgtttttatataagtgatggtgacaatggccatatttgttttggagcagataatgtttttaattttttaaagaaagcgctactcaaccaaataatagtcacatgacctacacaaatagttttctgatcatgtgaccattgctgatcttagatacatgttgttcttagatacagtttgttcatgaccttgtctctgccaagaatggaattaaattatgaagcccctactgtataataacaacttttccaaatacttgttcaactaactatcacacctataccaagatctaaagagtataataatcatcaaaaaggtaagaaaaattaactaaggttaagtagcctacgcaagttaaaacatctagaaagacgtgatttaaaatggggtttttaactcctagtacagagtcatcttttgggggcatcttcaactgaaacagacttcaaatctatgatataatatgagttctggacaaacctctgtttatcacttgcagtcacttagcatcactttgtttaatcaaaactgcatctaatagttttatttaacatatgattttctattacactcagtatatgagtgcttaataagtgtacctggctatgaaagtttattataagaaagtatgaaatgcatagttaatgcatatctttaagtaaattgtaaaggttgaatatcctgttatgcaaatatttagcagcctcttggtgcttaaattctgtttcaaatggggaaagtgcagatgatgctatgaaggaattctgatagatgattacacactctttgagaacactagtttttaaatttgctgtgctcctaatcaggatcaatttatcaaaactcccttaactgcgaagataaatagtgaaactaactgccttaataatagctagttccttctaaacttcttgaggctacatgcatatttccatgtctttatttaatatatacaaaatttatgtgaaggacacctttattatcttgttgtacttaatataataataataatgtatacagacaaaaaggaggtgccttagttctgaaagtgcatttttcaagatcacatactaaacatgtgttcagaaaatagcttcagagaaattatgatgatggttaaatatttatattattctcttcctgtttactataataccttccacttttcctgtaattaagtactgatgtttgccctgcataattattaaaaagttttttcttaatgaaggtgtttaattttaagccacattaagaattatctccatacatgctttattatgtgttacatgacaaatcttcaaaaatatattctattcctcatcctgttttttttcagaacagcaattcatttttcaaaccaaaacatataaagatgacttacagaaaaaaataccctaaaaaaacagaagcgaagactgttagaaaaatgactgtgtatttggtttaactaagtaggataatcaagtttgttacaaaaataatgtcaataggagacactctcagagttccaatgcctgataggtatcctactaagagtttattcatttgcttattctcttatctgctacctgcaaagaagacaaattgatattttcacttaagtgattccagatgagtaaacccattaaaaagaaaaaaagtcaatgattggcatacgtctgcaaatttagaaattttcacacatgcaactgttacactgcacttcccacgttcttccaaactggaaacaataatatgtattattttatgtaaataattaaaaactggaacaagtaggccacaataattaattacttaactattttcactttgctaaagctgtccttaacaagtggtctattaccttcattaaaattgtaatgaattttatctcccttggaccttttagtggaaatgaaaaataacatataaataagtaaatattgaaattatgcttgggatatgtcatattcaaaaaattgcagtttgctggtatattaaaaaattctgtacttctttgagtgacaccaaatatttgtttgcaaataaccctatatatttggaatggaaaatattgtcagccatgctgtcactttcctgctccactggcacaatttattttcaattgatttttgtttactactcctagatttggccttagaattcctttcagaacaattctctagggatcagtggctttgtgttttaaaatctatttgccatcactgatctaaactgtaaacgctaagagagctgagaactaccattcatggtgaaatagtccagccatagggaaaaggtagaacaagtgccttatagctacagtccttgccggagaactcttatgggctgttgagaaggctaaagcaacttcatcttggatgctaatcgaccatgtggacttctccttaaccccaattctgggaatgcctctaagatttctactttcatttatttagcaaatcctgaccttaggtcaaaacaagctttttttttttttttccccttgagatgaggtcttgctcatttgctcaggctggagggcagtggtgcaatcatggctcattacagcctcaagcagtcctctcacctcagcttcccaaagtgttgggattataggcctgagccaccgcacccagcaagagctttgatgttatcataaacgcatactcaccataaatcttgcccctaggcaaattctggatggtatagaagccttgaatgtggagagtaacaatgcagggatcccctatcttgtctctcagccgcctgaaacatggcttctgttcctaagtgtctattaattgttctttctgagatactggatttgccagcctctttttttctgcctctcagcttccttggcctttagaggtagttttgcctagacctgctcaccaaggaacggctatgatttgggagtaggtagatatcaaatagggaatttattgaggtatgcacaatagttccagagcttagctctgaaaagaagattgagttatatttaatgaagaaaccaatctgtttgtttgtttgtttgtttgtttgtttttgtagagtcggcgtctcgctctgttccccaggctggagtgcagtggcgcaatcttggctcactgcaacctccgcctcccaggttcaagcaattctcctgcctcagcctcccgagtagctgggactacaggcacgcaccaccatgcccggctaatttttttaatattttagtagagacagggtttcaccgtgttgcccaggctggtctggtgagctcaggcaatccgcccgcctcggcctcccaaagtgctagaattacaggcgtgagccaccgcacctggccccaatctgttttttaatctttacactgtcctcaagattctgaacatgaccatgcctcaaggcattggtataagcattttcttgtcataactgttggtatttattcagttcccactgtgtggcaggtagtgtgtgccacacaactattatctctttaacatttgcaacaatgcctcaagacagctcatgtattatcctactttcataaatgaagaaaggtagttggcattccattctctttttactataccaatcactttgcattggtgaataataaaaaatattgatagaaaacacatatcagggaccactagttattcggatgattgttatctttaacctatgtatagtttgatccattttgtcaaatttacattttagaaaatattgagcttaatggtcagagagttacaattctcacctcctagggtaaaaggagccatctgtttataggtcctcatgtcctcaaccacagggcaggggactgacccaccaaggcaaaactgatcattctaaggaacagagagctcataaggttagcacacctaccctgcttaatgtgccacatttaagcatattaaaaccaaataaagaagccatgagcattaacccatttttaattaatagtgttaaaacttaagttagccaagttacacttctatcagcttgtttctagagcatattatgttaaatcatatttttaaaatgataaattacactctgaagttgtataagaaatagaggaaagtagggcagatgaattctaaatatggtcttaatttataatctatgattattttacttagtttctcatgttcttacccacttgaaaaaaaattggttttgcccacagcaaaaacatttcatgttgaaggaacaaggactgtatctacagaagtttatgagcaggaatatgttgttttcctacttgtcaacacgagtctcccataggagtctctcctttttcctttttaagccaagtacttaattatggccttgtaattacttattcttgtcaattcacatcaaaacaacatagctacaagggatttgtttcttgattttagaactcgattaaacagagtccattcatgagctcccagtcctgctgagtggtctttcacttcctgacacataattaatatcaaacaattttttctaacctggaatgtgattttggtgcatctaatcaatcaacattgctcatgaaaatagatgaacaattaagaccactaaaaaatgactcagcctttagggtctttaaatggttgtgtttttctgaatacattcattttgcaggtaagcagccaaggttaataactgagtgatgtggaaagagcacaggtctacagtattagtctgagatcttgcattgattatttttagcatttaataggaagccattatgcactcagatctgtctggattgagtgctgatggtacaaggtaacctcaaacaaaataaaacacctgagcagccacttagtatgttgtgtgagatttgttttatttccttcatacttttattaaatctgtgatatatggggatgccgtggtttaggctggatgctgttatttatagacatttcaatggccagcagtgggaaaattgccttataaatttcctaggacaaaaaatgtgccttaaatatttaaactgttttcctaaaattggtgacttgagtcaactgttgagagtaaatagctcctttctttgtagagattgtggtggggtgaggatgcagtaaagcttgaatgggaatttagttagataaaagtaaaactcatgatccgcctgacttggcctcccaaagtgctgggattacaggcctaagccaccaagttcgagaccagcctggccaatatggggaaaccccatctctaaaaacacaaaaattagccgggcatggtggcgcgcccctgtaatcccagctactcggggggctgaggcaggagaattgcttgaacctgggaggcagaggttgcaataagccgagattgcgccactgcactccagcctaggcgacagagcaagactccatctaaaaaaaagtaaagactctattgtgaaattgagattccataaacaggagcaaaattgcttctaaaaataatgtaaaaaattatcaattttgaaatgaatgaggttgtgttccaatattgtgtttatttcctcttagaaaagtgttagggacaagctgccccaggaaccccccactccctcaatgtagctgacccttaccctgaatactctgcagctgcattcctgaacccttatctaggtgccacagcaaggtaaccagatttgctatgctgaagccctccaggcagcatgggggaggtcatgagaaatgtgggtaaacctatgttacacccttttgtaaattcctgttttcataatatattgtaagccagccacaagatgatatgtggtaaagttaaccaacaaacaactccagggcctctctccctggtataaacccctcactttgtaagctcagggctgcctcctctgactgtggtggagcaacccggcaggttaataaacttactcgcctgaccttgggtctctctctcatcttttctctcggctaaccttgcaaaaagctgttttgttcaggtctaaggtttaaggggagttgaggctttacattgtatagaaaaggcatgctcagggtcagctcattatgggaaagagctggctattacaaaagagcttagattggagcggaaagaagaaggctgagaggacctcttgaggctgggcatagtaactctaggacttgctgtattgtttgttggttttactgttttgcaatttctatctgatatcccaatacacacaaacacattctgttcttagttgtgtagaggtggtattaaaatactgcttgtgcttataaggagggtgtgtcaagttctatgggtttgcttctgtttgaagaaagttgatccaagatgatgaagctgtatttaagaaaatctgaattctcttctgaagctagacagtgggcagtgggatttggtatagactggaacttctagagtcgagcaggactccaagaccattgaaatttaggtttgaaagaagtgtctgattattcaaaatttaatgtaggcttataaatatgaaaactaaggtttagaggcaagaaagctagtaagtgacacagaagtaatattcctatttcaaatcttaattgttaagtttgattcagattatgataaactagcttgcagcagaacaatcctcccatcaagaaaaattttatcatctctattagggaaaacaaaaacaaaaacccgtttgaaggcacaggagagcaaccaagatagctaggacttgagtggctaatatcctacagagaagagacactcactagagtgagcttaatcttctgcaacacatttctgctcaagtcgtttgatagtttataagacaggtggatggaaaggcagagaagtcaagctaaagctgacgctaaaaggcaaaaatactgagaagagattttggcagtcattgagattggagacttcattcatattcagcattaccaaagtggctaataattgagaatccaagatcctgaaaagaaaagtaacatagagaagtgagctcaatggttgagccactttcccctcaaggcattagttcattcagatgtggttcaaaccaagagctggagaagcttagtacaacagctgctcctaagagactggaaagctacacacaactgttggcagttttcagaactggataagcattggatttcagtgtggagggtctccagtaaacaagccaggctttcagctggtgctcctgaaaaactacattctaaaagttgagacagaacatatgagatcttacaaaggcttcaactcacccttaaatcagctcaaacacagaaagtattcatacaatattcatctacctgcctatcaaaaactaaaaggaatcatctagagaaaataacatcaatgaaaaccctctacaaaattttgtattaaatcacaagtgtcagtggattaaaaatgtgacaaagaaaaaaagaaaagaaaagataatggaaaccctcacaggtggtccattcagtaatatggaaactggacaatgccattgcaaaaatgtcattctcttatatgaatttagatgtacatttgttgttgctgttatttagagacaaggtctttagagacccagactggtcccaaaactcttgaggagttgaggatcaagtgatccttctgcctcagcctcctgagtagctgagagtgcaggaatgcaccattgtgctggcttagatgtaaatttttttatttttttgagacagagtcttgctgtattgcccaggctggagcaaagtgtcgtaatcatggctcactgcatcctcaacctcctgagcataaggaagatgtaaatttttaaaccaaatgttagaaaattaaaacttgcaatgtttgaaaaattaatgtatcacaaacaaattgtgtttatttgaggaatgcaaattttgtttaaatattttttaagataattatattttctacatgaaggaaaaaggaagtagcataagatattctgaataggtacagtaaacacattttgtaaaatttaaccctcattttcaaaaaaaagcaaacaaaaaaatagcaaactgaaaataacagagaattatcttaatctgatagaagatatttatgaaaaacagagcaaccctttttctcaatggtgatatacagaaatcctttgctttttagtctgagaaagaattaagaagtttaaaattagttctgctatttaattttgtactagcagctctatccagtgtaataactcaaggagaaaaaagagcataagaacttatcaggagtaaataacacaaacattattcaaagcagtctggctatatatgaaagtaatccaaaaaaaccatcctgttaacctatcagaactaataaataaactcaaagaagttactgaatacagggcaagcatggttgttcatgcctgtattcagtaactctcagcgctttgggaggccgagatgggaggattgcttgagaacagaagttgaccagcctgagcaatatagcaagaccctgtctctacagaaaaattaaaacattagctgggcatggtggtgtgtacctgtagtcccagctgcttgagaggctgaggtgggaggatcacttgagcccaagtgtttggggctgcactgagctctgaataagtctttgcattcttgcctgggccacagagagagactctctgttgaaaaaaaaaaaatagagaaaaaaggttactgaatacaattaatacaaaatcaatgtcttcctttgtatcagcaataaagtttaagaaaacgaaataaaaaaagtctttacaattatatttaagcaaatatataactatgaatttaattttaaaaaaactaaataaatgcagcatgcatttaccttgtatgttgattagaagatgcaatactgttaaaatgtcagttcttcccaactgatctatagattcagtaccatctcaatcgaaatcgcataaaaatattttttagagactgtcaagttgattctaaaatttgtatgcaaattcaaaagtcaaaaaatagctaagacaacatgaagaagaatcaagccagaatacttaaaatataggatatcaatactttttatagagctggagtaattagagtaatgaaggtattggtataatggtagataaactgaccaataaaaaatgagtccagaaggaactaacatgtatgaatatttgattcataacaaaggtttcactgcagagtagtcgggaaagaatggtttttcagtaaatgatgttggtacaaagtgcatattcatagggaaaaaattggaacttgtctccctatattacactatgcataaaagtaagttcaggtgtactccagatttaaggacactaaaacactaaaacttctagaatacaaaacagattaatttcatggctttagaggtaagcagcaatttttaaaagaccaaaataagaattaatataaagaaaattaaaatggaccatcttataattaagaacttaaaaatactaataaattagtgaaaaagcaaacctcagattacaaaagtatttgcaatgtataaattatatataaacatatatattatgataagagtaaaaaaaatcacacaaaaaatcagcaggaacttgaacaaacacttcacaaaagagaatatctaaaatagtcaaaatactaaagaaaaaggcagtcaacctcattggtgatcatagaaatgcaaagtaaaaccaggtagacctaccacagacacaccagaatgactgaaattaaagcaagaagaagccatgtctagtggcacacacctgtagtgccaaatactctggaagcggaggcagttcctcatctcaaaaaatatttaaaaattaaaaaaaattttaaaaatagtgaaaagagcaagtgctgctgagcatgtgatgtgaacaactagatctctcctatacttccaggagtgtatcaattgaccacagtctgcaaaagtatatgtcagtatttactaaagctgaatgttagcatgcccagtatttcagaaattctcctaagtatatactcaatagaaatgtaaacatatatgtacctaaagatatatacaataatgttcataacagcactatttgccatagttaaaaaaaaatggaaactgcctaaatgcccaccataccagggtacataaataaaatggttatattaggttggtgcagaagtaattgtggtttttacgattaacagtaatggcaaaaatgcaattacttttgtatcaacttaatacatacaataatatgtataattcagcaatgaaaatgatcaaactacatgcatgaatcttactaacataattttgaacgaaacataggcatcaatgagtacatacactatatgaagtacaaaaataggtacaattgatggtaaaaggcatggccatggttacctttggaaaggagagacctatagttactgagagggtgtttctggagggctgacaatgtcctgttgctgacaagatctgattacacaagtgtgttttccttttggtgattcgccaatctgtagtgtgcatattttcacctttctcttattctctaatactcgcataaagaaatttgcttaaaataattaaaaccacaatgtggtgagtgctataattccttccacaaagagcaatcagtatgttcttttccagtaaaaacctgcgccaaggaacatagagacactgaattgtggggttaactctgcatgaaggtgtctgggagagatacggttttgatctgtgtccccagcagcttttatgtcgaattctaacccccagtgttggaggtgatgcttggtgggaggtgattgaatcatggggtggagtgctcatgaatgggttcgcgccatccactggcgctactgaacgggttagctggtactcatgaatgggttagcgccatccactggtgctatctcccagtctcaggtatttcttcatagcagtgtgagaatgaattaataccgaaagacacttagataatgcgttaggtaggattgtggaaataaatagatattttcttggcacaaagagaggagtgtgtaaagaaacagcatgcattaagaaactttccaagactaaaaattctgggaatgcagcgtcttcctgcaactgctgaattaattgttaaagtttttgccacttgaagatctttcctccattttatcaatctacggaagagaaacgcagtaaaagataatctactgctcacggggcttattatccatggcctccctcctgctgaccatcgactagacatgtggctactcattatccccagaaagagtgctcagggaaggaaggggaaaaagtcaaattagttaattaagcatctctggccaaaggtttggtagtgggaagaggttgaaactaatgactaaaataaatctgttagatttaatgaaactcttagttttggcttcccctgactatatggagaaatgagaattaggctttaatttgctttttaatagtgtcccatctgacacaagctcttatgcacttaattcagcaattaaaagttttaatgtatagaagatgctaaggaaaagagtgcccatttaaacttgtcattgattccctgaacaaatgcaaactaagataacaaaaaccacacttagaagtcatttttttaacagcaaactttattattttactgaaatgcaatgaaataatgacatttgctttctgtagtcaatgacattacatttttttaaaactaaatgtcgctaatttttattttcaaattataaaacatttaccagtttaaaaaattataaacaatgtctgttttcattggaattgtcccttgagtcattcaactttaatggatgcattttacaatggagagcatttcattagatgggaatgtggttcaaagctacccaagaaagatatcttctgcgtttgaaagccagtccattgatacgtgacttactgaggattgaaaaggtttattgtaatacaagttttactgtaacaatcacataattaagatcacacattactcatatcaactggtccaccaattcatcatcagtgaacagatttttcattgactgctggagactctgatatgttgggatctacatatgagtaagcaaaacatggagaaatggtcaaacagcagcagtccatgaagcacaaattggaaatatttgcaatagcgattcacagtgaagagatgacagaggaaggatgataggatttatattgagataagaaaaagtaaccatggggaaaatagcactattaaatagaaggcatctatttctgaaatctgagaatatccattaaaaacccatagaaaaaaagagacagtactgcataccatgaacaaaaatagatagtatctgtgtggatctatgaagtagtaaattatcatagtaataggatgttaatatatgcttgatggagactttgtactttgaagacagaagtttgagcaaataatgacttagacttgaatctgaaatagccttctaatatgatttggctatgtccccatccaaatctcatcttgaattgttattcccacaattcccacgtgttgtgggaggaacccggtgggaggtaattgaattacgggggcaggtctttcctatgctattcttgtggttgtgaataagtctcacgagatctgataattttataaatgggagtttccctgcacaaactctcttctcttgtctgtcaccatgtgagaagtgcctttcacctacttccatgattgtgaggtctctccagtcacatggaactatgattccactaaaactgtttttccttgtaaattacccagtctcgggtatgtctttattggcagtgtgaaaatagactagtacaccttctatctctgaactgaggaagttactggtttgcatcagtttggtaccatcaagtttctgagtggcttatatggctaattaagggaagacctttaaaaaagtgagataataacccacctaattactatttttaagtgaatttccaggtatggcatatatggctaatgagcagtaccatgatcttgtcacaattttcaggtttgatattatctgatcatgggaataatcattacatggatttctaccttagtaataagaatagattggaattgggagcacagattattttcatctctgctatcaaccactccagtgaccctacgctttcaagattgttcaattatatagaatcacagacaagaaggatacagcaataattaacctggtctcaggtgatccatcctagatgaattagtcaagatttattttaaggaatattaaagaattggcttacatgattgtgaggactggcaagtccaaaatccacacagaacaggttggcagctggagacccagggaagagttgatgttgcagcgctagtccaaaagcagtctagaggaagaattccctctttcttcaggggaccccagtctttttctctcaaggctttcaatgaattggatgagatccactcacattatggagaataatctgctttactccaagtctactgatataaatgtgaatctcatctaaaaaaattcttccacagagacatttagactgatattctgccaaataactggtactatggcttcggcaagttgacacgtaaaattagccatcacattaacattcgtacttcctaataaaaataatctgatttggtcagtttgctactctctaatataaaatactaaattgggaaatgtttttcaccaatgtgttagaggatgttggcttctttcatgtccactgtgtaatactctttatactttcactgatccctgggatctttgattgtgagtcaggaatcaggggagggtttggaagattcctatgaatcatggcaaatgatgcaaagagaactgttaggaatcatttccttagaaatgggcagagaataaggcaggcacttagaatttcaatactttctctcaaacctacatccaaaatgtgtatgtcaatttgcaattctatcagcaataaatgtgcactgaatagaaagttagaatgatattaatccctttaaaattttctcatttctctaacaggtataaaatgaaatgccaaattgttgtcattttcatttatttgaataccagtgaggacaaatttccccaagtgtttttttgttttccccttgagcaaatgtttattcatattatttatccattcatctgttaaaatgttacactattctttatacatttgagtgagctttttatgtactgaagatattaacctctttatacctttatcatgtcgaatataagcacttcacatttagaaacttgtctcatattttagttgtatttattttaattccagaagtataaaatcgtgtattttcaaatctttcaatttgttctttattactttttttttgtttcaaaatgtatcattcctcattcctttacacatctaaaaaatattctcttttattcttggcttatatacatatatatatacatatacatatgtatatatatatgtacacttatatatacatatacatatgtatatatatatgtacatatatatacacatacatatgtgtatatatatgtacacatatatatctatatctatatctatatatagatataaagtaagtttcaagactacctacagtctatttgagagaatggtatctactccattaaacactcaattttctttattcctatatacttgtgagattatatatttgattaaaaagtaagatatatgtgtacaaatatgtacgtaaacatgtatatgcaattgtatgcatatttatctactagtacatacatatgtatatatagaaatgtctatgtctatcatttatttaaaaagaaacctctttctcttgacaaggaattatccatctgacaaggtattaataaccagaatatataaggatctcaaaccactgaacagaaaaataatttaacaattcaattaacaaatgggcaaaatatctgaatagacatttctcaagaaaagacgtacaaatagcaaatgagtatataaaaagtttctcaacattattgataatcggtgaaatgcacatcaaaactacaaggaggtatcatctcaccccagttaaattggcttttatacaaaagacaggcaataacaaatgctggtgagaatgagaagagaagggaaccctcgtacactcttggtgtgaatgtaaattagtacagccaagatggagaacagtatggatgtccctcaaaaaacaaaaatatatttaccatgtgatccagcaatcccattgttaggtatatacccaaaagaaaggaaatcagtatatcaaagagatattgctttcaatggcaaaaattgtaattacttttataccaacctaatatatgcactcccatttttattgcagtagtattcataatagccaagatttggaagcaacctgagtgttcatcaacagatgaatggataaagaaaatgtggtacatataaacagtagaacactatttagccataaaaaagaatgagattttgtcatttacaacaacatggatggaattggagatgactagattaagtgaaatatgccaggtgtagaaagtcaaactttgaatgctcttgctaatttatgggaactaaaatttaaaacagttgaactcatggagatagacagtagaatgatggttaccagaagctgggaagagtagggtacaggggaagtgagaatagttaatgtatacaaaaatatagttagatagaatgaataagatctagtatttaataactcaacaatgactaccaccaacaataaattattatacatgtaaatataactaaaaaagtacaattggctgggcacggtggctcacgcctgtaatctcaccactttgggaggctgaggtgggcggatcacatgaggtcaggagttcaagaccagcctggccaacacggtgacaccccgtctctactaaaaatatagaaaattagctgggcgtggtggcgggcacctgtaatcccagctactcaggaggctgaggcaggagaatcccttgaacttgggaggcagaggttgcagtgagcagagatagtgccactgcactccagcctgagcaacaagaacgaaactccatctaaaaaaaaaaaaaaaagcataattgcactgtttgtaacagaaatagatgataaatgcttgaggggatgaataccccatttaccctgatgtgattatcatgcattgtatcaaaatatttcatgtaccccataaaaatttcaaaaaagaaaaaaaagagacagaaatttctcatcaatatccatttcaaggtgcatcataaggttggaagtacaccattttctaaacttacacaattcctattttgttcaggaaaacatatgcttagttataaatagtcatccctccttactttcctgcaataggaatagagatgcgaccacgccctggtcaattagatgtaaatagaaatcaatgaatggggcacctgaatagcaatttaaagggagccatatttaggtggtctatttctttagctgtttatctttctccttttctcctttgtcctatctagaataagcatctgatacctgaaggtaaaacagctctctgggggaagtgagaataaaagccacacactggggttggtgtaacagaaagctggaattatctgggtttttaatggcatcgtggagaagtcttaccagccttgacttacctatgtctcccccagttttggtatgcaagaagaaagacctttgtgttgtgaagccagggtaggcagttttctgttttctgcagctcaatgcaggcctaacaaatgcatttacttctatctaggacttgcaaggctttttatttatctataccactgaaaatggcaaataaatcatgtttcttgcttctaaaacaattaccagttttgtctttaaacattgcataagataatataatgtttatagagacaatttaattttaaagaaacagggaagttaaataaaacaatgcatatttcatctctgttatagaaaacacattgatctaagccatgggcccacatctataattaagccatagcccttgacacaaagtgttcgcattctagtgggtaagaaaaatgtatatggatagctgtgacactgtctgacaagtgcaataaatataatatttccaaagctcaatccaaacccttctcaaaatcattttttctttattttttctttatttctcaaaatcattttccttttatcacagggcagcattattaactcaagtcccatcactcacccaagactcaaatttcaggatcttgcttctccttcatgcttgcaatcaatccaatttcccttaaatgtgtaccacatctatctccatttatggtaccactgtttatattcagcaaccacctaagaattattgcactaaccagttgactggcttctgtatccttcatcttttttaactcctttatgtttttatacctgttaccacagtcataaaagtttttttctttaaaatctgtttttgtttcccaacatctaccagataaaacctaactccttaaggtgactgatgtgttagtgagagttcttcagggaaacagaatgaatggagtagttataaataaagagatttattatgagaggttaacttatgcctgtaaggaagctgagaagctccatgatctgctctctgcaagttggagggacaggaaaatcagtggtatagttccagcccaagtccaaaggcctgacacctggggaaaaaaagatgtaagtccatgtccaagtcgaaaggccagagaaccaagagctccagaggataaaagaagagagatggtccagctcagcaaaggaagtgaatttgcctttcctctgcctgtttgttctattcaggccctcaacagattggatcatgcccacccatgctggggcaaaccatcttctttactcagtctatggattcaaatactaacatgcttccaggcacaccttcatcgacacacccagaaagtaatgttttaccatctttatgggcatctcttagacctgtcaagttgacaaataaaattaaccatcacatctgataaggcctataacccaaactaggtgcccacagcataagtgccagccaccgtgggcaactgggagttcccggaatgtgtcatgctctttcagggcccctccggaatgtgtcatgctctttcagggcccctccctatgccatgggaacccttctattctcttctctacctgacttgtaagagtctttgtggaagcttttcttttcttccctggtaactttaattctctaccctctcctggctcataggactttcttcattttttccttccttgtccctctctctgccttcccttcttccgcctctttctcctattccctctttctttttctccatttttcccttccttgctttcttttttactttcttccttttctttctttcttcctcttctccctaatctttatactagaataatttgttgatatatttgtgcttcgtaaaagtccatgaggtccttgcaataggtcactttgtgttacaaagaacctggtttttattttttattttttgatcaagatgttaagatctaatttcaaaacatatggaaataattgcatacatttaacattactgttaaaaaaactctcttaaatcctttaggaaacaataatattatttttgagacagggtctcactctgtcacccaggctggagtgcagtggcacgatcatggctcactgcagccttgacctcctaggttcaagcaattctctcatgtcagcttccttagaagctgggactacaggtgcgccccgccatgcctggcttagttttatttttgtatttttgtagagacagggactcactatgttgcccagatgggtcttgaactcctgggctcaaaagatcctcctgccttggcctctcaaagtgctgagattacaggcatcagccactgcacctagccagtattattattaacaggagtaataactaatacatcaattacattactatgtgacaagctttgtgtttgagcaaatattcaacatgtttttgtttgtgtgtgcacaatctggacaattatatatgttgataaatatataatgtacatgattataggcattacatgaaaaaacatgagaaaatatataattcgttttttaaatgtgtataattttttgttgaattcagtgttaaatttgtgtaagttaaatacatatatattgtgactcacttatattctgtctggtttttcattgccccaaatttgattaaaatttattcttcaatctttctgaaatgggtttagtttatagaatgaggagtaaatctaataaagctattcaaggcctcatcatattttccccagccttaaaaaaaaaatccagagaataagatctaatttcataacatatggaaataattgcatacctttaacattactgttaaaaatctcttaaatccattagaaaataataatattgtttttgacacagggtctcactccgtcacccaggctggagtacagtagtgagatcacggctcactgcagcctccaacttctcttcaccagcaaacaacccaggcctagatctccaaattctgaaatacaaaaatgctgccctttctcatctcagtattcagaaggtggcaaaaagcactctccttttcaatcttcaactccctaccccaatacagattttcatactggccttgactcaacagcagatcttctctgcgctcagcatccagggctgcccaacttacactcagagggctaattaattcctgccccctggtggtaaaatgtgttgtctttaggaacgtgaaagcttggctgccctaagagaggtgagagacaccttttattccgtcctgaagagataatggccacaaaacaaggtctgatgtagtttctccataggccaccctgctagtataacctctcagttactctctctgatttatgtttcctctttaaattctgattcgggtattttgatgatctgctcaaacggctcttggctcaagtcattcagctgggcccaggtttgatagcaaatatgcttgcagaaaacccaagctaaagacatgtcaaacaaactgggcataaaacacaacatcgaatcctatttttttttttctgaatctccaactcccaagtaatgtgtagttaaggagcacagacaacaagttaattcggtgctccccataattcccaagccatgttcagggccctgccttctaaaactttcaggggttaccaaagtatctctctcaatggacctgtgcttcccatttcgcttgctgaatttgcagggaagcaatacagtgtcaaactgtggttctcaacccaggtgatgtgcctgcctcccaaccccacctaggacacatttggcaattttcacattgtgtgcgtgtgtgtgtgcgcgcgcatgcgtgtatatgtgtgtgtgtgttttgagggtaccagtgctactggcatctagtgggtagaaaccagggatgctgttaagcatcttatgatacacagtaaagtccccatcttcaactaataattcagtccaaatatcaattgtgctgaggttgttaggccctggtggagaggtttaaagattctggagttaatcagacttgctttgtatcctaaatctgtctattaggttctctgaaacctaagtatcgtcatatatacaacaggaaaaataagtttcaccttagggtggtgtaatggctaaatgaactcatccatacaaaacacttatccacttatcacagtgtccacagaataagcacttaccatatatgttgttattatcactaattttattaacacttctcagttcaaaatgaataaagaacttttcaaattaaaatgaaagacatatattagaattctaataaaaatgtatttgatacaaaaaaatttacatacaatttttaccatcctgcagtagaagtgaaatgtttcttgcattgctactcattggcacaattgttggcttttggtaacttttttcataactgaaaattgttgctcaaatatttctgctataccaaaggagtaactcagtatatgtgcaaataagtcatttaaaatagttaccaaataccatcaaacatattatttctctcctgattcagttcccttgggtcaaaagtccttattcttggagctggtagaaagactttctccactgacactataaacgttgtctctcttgagatatcttatgtttgtgtcaagcttgctatctttaggtactcataaagtcatcagtgtttaaaggagcagaccatgacagggtcctttccacagcactgggccatctcttgtcacgggcacccaggtatctcataaaagtctatcatgcaagtagtgtcttcaatgtcttctctctggttctcatttcttacaagcgatttcttgaattcttggaaaaagtttttcatagtaaaaagaaataattcaaacacagctctgtgtctaccctacttttcaaaaattaactcctctgcaacttcattttaacaaaaacctgcaaaccaaacaacaactttaaaggtaaactttgattaaacacaagaatttacattcccaaaaaacaaagaacttaatctcttcactgtgagctactaataagataatggaaaattgctttatatttttatatcttaaggtgtaccctggatgatttgtatcatgtaaagacacagactgccctgaaaacacattgaagtttctctgaggatagaaattgatttcaatttttctcttctttctctatctctcccgaacaccccctcccccaccaccccaccacaatttaagtgtctaattagctagagcattttgttacgtatagcattatttcagaatgtactcatataaaatttgagcattgtctacacttttgaatgggttgcagtaaatccaaccctatgttgatttacaactcttgcagtaaaatcatgggattagagcattctgcattggaatgaatcttgtagatcaaaaaacactgaattggaatgtattttgtaggctattgggttctaaatttggatataaggaaagcgaaggaaagaaatgagatgatacaagtaggccccacagtgagaggggactgtgcttcctaaactgagatgggagatatgtgagttacacatgagttaataaactaaatacacatataattggcttacttaaggaagaggtctaagatacagaccctgtgcatagtattataaagattgtatcatagacacatgccatctgggttatttgtctaagtacctacaaccaaagtattctccaacagagataattaggggaaaagacaggacattctatatgatttttaagaaaggagaatgaagtggaacagagtactcgtgaaaggttcatacttcagaaatagacggttagctatggtttccatagaagaataaaataaatgataatctgtcagcttagattgctcttagaaagcaaagaaagcagtgtggtgattccgcaagagctaaaaacagaactactatttgacccagcaatcccattactggatatatacccagaggaatataaatcattctaccataaagacacatgcatgcaaattctcattgtggcacttttcacaatagcaaagacatggaatcaacctaaatggccattaaggacagattgaataaagaaaatgtggtacatatacaccatggaatactgtgtagccataaaaatgatatcatatcttttgggggaacatggatggagctggaggcctttatccttagcaaactaacacaggaaactacaatcaaataccacatgttcttacttataagtgggagctaaatgatgacaactcatggtcacaaagggaacaatagacactggagcctacttgagggtggagagtgggaggaggaagagaagcagaaaaaataactgttgggtactaggcttagtaagtgggagatgaaataatctgtacaacaaactcccaatacatgagttcacctgtataacaaacctgtgcacatactcctgaaccaaaaataaagcttttctaaataaagaaagcaaagagcagacccaaataacatttgtagtacctgaagacttacgtgcaaaatagatcaatcaacagagatatgctgaatgaattaacaaacccaaagaaaagttttctgtgttttttgtttttcacaaaagaccctgtgtctgtctgataatatatttgagggaagattcgcattttggaggccttcatattacagaaagtcaacgcttacatgtattatttttatgtctataaaaatagcgactgagccaacatgagaatcataatagtgtttccttattatcttctgtgaccagtttctgtgtccttaaggaggggcgatatgaaaatatattatcagttattatgtgcctttgtcttgtttacctctcaaccttcttgcaaacttctgataaaatatatgtgtgcaataaatatttgttcattgagaaagaaaggctatggaaaaaaagagcagggagagataaaagtaaggctttgagttatcaaaatgaagttttctaaagcaaatttttttgtttctgaattctggaaatacaaaagaaaacagacaaatgaacaagcaaacaatgaataatttctaaagttttccagtcttgggttctacctgagtattatttgtcccatacagaaaatctcactttcccttctttccctctaatgcccacctacttcttccaaatcaaattagtcttttttaatcatgctaagacaccaccatgaataacttatggttgttttatagaattatttattgactttcaagaagatgattctaccttaactgctaagttctgcaccgaaaaattgagagtctgtagtctctttaaaaggcaactaatttaacaaggaaagattcaccaatctctttcctgtcattttccagaaaaaaaaagttttgaataatttattaccagtttcctattagtaaatcaacacacggcataaataaataattccttgtagctggggttttccttgtcattagaaatagataaccagggccttttatgcttgatgataaatgtttttccaaatattttgattaaatttttttttttttttgagatgaagtttcgctcttgttgtccaggctggagtgcaatggtgtgatctccactcactgcaacctccgcctcctgggttcaagtgattctcctgcctcagcctcccaagtagctgggattacaggcatgtgccactataccctgctaatttcgtatttttggtagagatggggtttcaccatgatggccaggctggtctcaaactcctgacctcacatgatccacccgcctctgcttcccaaagtgctggaattacaggtatgagccaccacgcccagccttgattaacttcttaaataaaatcaagtgtttactcactttactctcccatggattcagaacactggcaggtggttaaaagtattgttagaaattaattgatcccaggccaggaggggtggctctcgcctgtacttccagaactttgggaggccaaggcaggcaggatcacttgaagtcaggagttcaagaccagcctggccaacatggtgaaacctcgtatctaccaaaaatacaaaaattagctgggtgtggtgccaggtgcctgtaatcccacctactctggagcttgaagcaggagaattgcttgaacccaggaggtggagactgcagtcagctgagatggcaccactgcactccaacctggatgacagtgagactccatctcaaaaaacaaaaagaaattaattgatcccagaaatctcatctaatatccacaatgaaagtttagggtagtcaagatataggccacacttttagatgtcagatattgaatcagctatgtcaatgtagacatgatctgctctatggtaagatatgttgtatgctgcttgctatgcctactgtaggcgcttagtaaagatagggggatggaaatgtaaatacatgtataaattcaatcttggattgcaggtttctcctcagaaaaaaagtagaaaagtgacagtttttcatgatttagcactgattaacatgattcacagcttctttcttctctctctctctttttcttggtggcataaggacaaactttattgagaacagcactagttctctttctcctgcccggtcttggttccctagactatcccgtctggcgggcagcaatgagacccactttggccagcagaggcatctctgcagatggtggagggcttgccgatgtgctggtggctgccacctccctccgaaatgatgctccacagggttcatgttcacaccccaccccgtacttgtggccagcagttcctctttgccttatatctgtggtatgcccagccagccttcaggatgggtttgtcaatttggccacctccagccaccacaccaaccacagctctgttggctgaggaggtaaccttcttggagccagagggtagctttacacggctcttcttggtctcaggattgtgggagataactgtggcatagttccctgatgcctgggtcagcttgccatggtctctaggcttctcctccaagcagcacatgattgtacctctcaggcatggtatccacagagagaacattgccaatgttgagctgggcaacattttactatttcatattaaaatgaggtttaatattttataataatggtgctagaatttcaattcataatttgaaaatgtaacaagcatttttttaaagactctgtctctcaagccctccacaaaatgtgacctcttcccacaatcaattgagacttgcagtggcaaacccctctcttgctgaatttgattgatccaccttccatcctgatttccacagagaccctgggctggtgctgatggagcattttttgtcatgggggaggaaatgatcctttcagaacatttagcaataaaagcagtgcaaaaataaatcaacgtccctgacctttctctctccctatttttggcaacaaaccttttactccaagttgtcatttttctacccatgctcagaatcaccttcttattctccaggtgttcctaaaacttctccataaatttctcagtggcgtctccatttctttctatttccagttatgtccccatggctggctttgagaccgttagtatcacgtattaattattcatcttctgtcatcttcctaccttacattccactactggtagtaatttagctgattattttctgtattttcagtaaaagccttgttaaatgaaaatccttaaacatgtattctgtgaacaggttctcaccattatctataataataatatagattgagtatccttaatctgaaaatccaaaattcaaaatgtttcaaaatccaaaacttttttaaaaaattgtattttattttaggtcctgggatacttgggcagaatgtgcaggtttcttacataggtaaacgtgtgccatggtggtttgctgcacttatcccaaaactttctcagcagtgacataatattagaaggaaatgctccttggaacatttcagatttgggattttcaaatttgggatgctgaaccattgtaatgcaaatattccatgatccgaacaaatctgaaatccagaatgcctttggtcccaagcactttggatgagggatgctcaatccgtaataacagtagctgtggtaatagctatctttcactaagtagctacattattcctggtacatttctaagctctttaaaatatacgtattgtctcatttagcccttaccatcacttgatggagttttattgcaatccctattttacagacgaggaaactgacatgtagagtctgaaagtagcatctcaggccccatgcttgtaggcctacaattcaaactcaggctcttctgcctggagactttatgctttactattctataccgctcctagatgtgggagagctaacccacaaggtttacatattctaaattttagcaactgatgtcaaattgaccttaaaatggacgctataaatttaactcccattatagttagtaatagttataattagtaagcatgaataagacctgctatttgatagcaaaacaggtgacagtagtcaataataatttaattgtatattttaaaataactaaaagagtataataagattacatgtaaagggatggatatcctattctccatgatgtggttattatgaattgcatgcctgtatcaaaacatttcatgtactccataaatatatacaccatgtagctacaaaaatttaaaattaaaattaaaaaaaataataaatttaactcccagaaatattgaacaatagtggtgctttcagtcttttatttatatctacctaccagatcaggaaaaccaaaatctcaggtcttaaaatgtgtattcctgggtgttgaaggccgaacgaatgagggtcatgatcaactcagtataccactgaaggccatatgagtaaacagcaaactgtttctcatgaaagcaggatgttggcaaactgacaaactgggtctgccacccagaaggaatgctaagggctgccacgacccaggcacaagtgtttcttgtgattaggcacatctgaagcctgttagcaataaagtgaacctgtgatcaatgaagcagctgaccaattgttacctcctcctccctgctctttctactcaataaatacgaagggctgtagaagctcagcacggctgcctttgctcattaggagaagggagcccttttcttcttcccctggccccttcctttaaaatagtttcttttgtctgaagctttcatttctatgttcttcctccttcgttcagtctcctaatgacagtctcaggtagtaacagtagtaactgccgtagtgatagtctcaagtagtaactgtggaagtctgccatacctgggggcaaattttagccataaaaatatactgtattcttcagtgcattagtctgaattgttgaatgttggaagtgaaagaatacagagtggtactatagcctcctattttatgatggtaaaacctgagtatctgagggttaatatgacttccataagtttccacatagaaatacaaggtttggggagagctcagatgttttctatcttttaaaatgctatttctgctcatcagcactgcctcctataaccacttctttagaaattacacttaagtaaaggatttcatgttgattatttgatagatgtgccaaaatactgtgctggacattgaatgctcatgctagaggtcaaagaaggcacctaggaaggcaggatgtaggataataagtcctcttttctaacctcttgtactattctcatgaaaaataaaatactaagagaatagaaaatgaaggaaaaccctatgcgtagaatcagcccgtacgtttctggctacccaccaagcatacttattttagcatttgtttatgatacagactttgtgattacaaaagcagccatagattatccaaaccactaatgtgaagacgagtaacagaattgtgaaattggaatgcatcccagaattaattgtagataaaggcctatcatgccatatgacagacaagtgattgaggactagagacgttaaattacttgcccaaagtaacactgctagttagtatcgaaaccagaatttgaatttaagttttctaaatgtatacatttccataaaagtaagaatcgatctactcaacttgttcaacaaatgactattaagggattattaattgccagacaataatctagccattgacaatttgatggcaagacagatatctttactatttccctggcattaatcaccagtggggttagagaatgtggagaatgacacccccacctccaagtctcagctctcagtgttgacgtccatgtggcgggaacaccactaggaaaaagtttctgacctccctctgtccattaggcaggtagagggaggttttcttgtctgatcaatgggcttggatatggaattaggcatgcttaatcagcacctcctttccttcccatcaggtagcttctattctgctctacttctctcctaagcgtgattaggactccagtggtctagcaccgtctgtctctaggtgaatgtcttagcccatttgggctgctgtaacagaagtaccataaattgagtgggttatcaataacagaagtgtatttattatagttctggagtctggaaaacaaccaaggcactggcagacccagtatctgatgagggccagcttcctggttgaagactgccaacttctttgtatcttcacacggtggaaggggcaaggcagttctctctgattgttttataagagcattaatcccattcatagacggcttctccctcatgacctaattatcatctcctaaatgctctatctcctaataccatcaagttgggggttaggatttcaacatatgaattttggagggaacataaatatccaggccatagcaacagctcaatctatttaattctggaattaatatcaggaacacctcttacctttatatagagtcacctatctctgtgagaagtaatttcagtagtaaaaacagcagtttactcttatttgctgactcttttattctatttttcatttggttcaaaaattgctgagggaaaggagtgttacatttgggatcgccatcaaacctaacacaaaaattcagatcaatttttatgtagcaaaagtcgaaggccctatagaaacatgcaagggtagtttagaagatatgaaggctgtactacctaattttaggtcatgtaattctgatttgctatctatattttatttgtgtattagtttgctttttttttttttttttttgaggtggagttttgttcttgtttcccaggctggagtgcagtggcatgatcttggctcactgcaacctttgcctcccaggttcaagcgattcttctgcctcagcctcccgagtagctgagattacaggcacccgccaccaggcccggctaattttttgtattttcagtagagtcagggtttcatcatgttggccaggctggtctcgaaatccttacctcaggtgatccacccacctcagcttcccaaagtgctgggattacaggcgtgagccactgtgccgggcctagtttgcttttaataatgggcccgtcttgcttttgaaataggcatcttttatactgaaatgatattataattcactagagagagattcattacaatgtgtgcctattctaaacctcacccaagagtttctttgctcacataggtataggatagtgactcataccacggacctttgaggcataattaaagcaaaaacctaaaatattttcttctttaagaaaaaaaacagtcttctggtcaactacgtattaaatgcacttatgatttttatagatgtagcctaaaatgacaagtatatagcataaactctaagagttagctcagaagaacaaatgcggtctgtgatggttatgaaggtatggtctgttttaaacgttacttgttatgttctgtcaacagggggcactagagagtaacaggcaggaggagaaaggaactgttccttctttgcctttctgtttctgtaatgtcactgtggcaatggcagttggttccagttcccccctcccaccttctgatttgaagaactagtctcattgaattcccaccagagaccagcacaccccaacagcagtgccccctccatagaggtctggctcaccattccacagggtccccctgttccaccgtctgaactgtgcctctcttcagagatcagtctcactcccctagcacttattggattctagcaaccctgacttcttccctttgtcccagatctcacgggtgaggctgcttcctgcaattactatccccatcatcttggcatttccagtcctctaatacatgcctaaccaattctctatattatattgccctggtttctgttttcctgcgtggactctgagcagttgcccaatgctaggcataccatatacatttaggaaaagttaaactcccaaatgggctttctccaaccactctggatccacagctaacattcaatatccaagtcagttctagaacatgtcagcatcatccactcatcaaatcagtagtcatgtgaacagatggtgctcagtagcacttctagaagtaaaatgttaaagaagaaagttctcaaacaaaaacccttgaccatcatacttattgcacagtatctttgcaattagggcaagggtcaaaagccggcaatatgaactggtttctgagaaataagcttaaattatttatgcattctttaaaattgtttctaagttacattattttacaactaaagttgcctccagacaagaataacgagagagaatgagacaaagaaaaaggatgtttgggggtacggggcaaaggaaacagaactgcttgttcttgccttatgttgaaattccattcttcagactgatttagcaactataataaaactcactcagcagtttgaaaaactaaataaaaattatcctcattgctttttctgagcctgtaaaagattgtagtttttaatgataatccatttgtggagtcttccattgcccactatctctccctgtgatcaggttatattctggtgcccggctaaaatcaacttttgatcttcagcattccttgagtttctaattatgatgatctcacctatcagtgtgcctctcctttctttgtttgcattttccttttattttatggctgtagaaataaacacatgttatctctggatcttcatatcaggaggggatatatgacttgataagctttctcatcagctgttgaaaatagtcagattccagcccaaccaaactggagttaatatgttgcttgcaaaaatatgtcagactttttattgtgttactcttttaaaaggttaataattgtagagtttaaatggtcaaggttaaggtgaaccttattattacctgattatgatatttaatgtctttagttgtgaaatcagttccatcagacatggggcctggtgtctactgaaagctttaatgatctggcccggggtccaggcagattttactagtacacttaggtacatgtgttttacaagaagggtggagtctctcagttaaaatgactgcagtttgcagcttctcttccgaaaattaactcatggaggaaattctggtctcctatggcacttcctctgtttttcttcttttgaaacataaattagcattagcccaaacacagggtcttgaggaaatatgtaagttaggtataaagcttccattggtagctcttggcaattcagtaattaaggtgtaacaaaactaaatgcatctctactgatttaatggcttatttgtgacatgtaataaaaatatgcctgtatctttaaaagtcattgcctgggcttggatggattcgataaacactttgggaagggaacatgcggaaggaaggcatagttaaacaccataaaaaattttaacagaggttggggccaggagtgttggctcatgtctgtaatcccaacactttgggagactgaggcaggtggatcacctgaggtcaggagttcgagaccagcctgaccaacatggagaaaccccatctctattaaaaatacaaaattagctgggcatggtggcgcatgcctgtaatcccagctactcgggaggctgaggcaggagaatcgcttgaacccaggaagctgaggttgcggtgacccgagatcgcaccgttgcactccagcctaggcaacaagagtgaaactctatctagaaacaaaacaaaaacaacaacaacaacaaaaaaaaagcacagtttatatctagaatgatagaatcatcatattttagaggtgtaagtgttcattaaattcaacctcttctttttttctggtagggaatctgaggcccagagacaaaatgtgacaataccagcactagagaataacctcctattcccaagcccagtctccttttacgactctgtgccctgtctcttgtctccagtcatctgcctgacttggctgcagtgacaggcatcatctctacttcccacaaatatgtatgtggtcccacaggccaccaggcaactatccaaatggcctttagattttatgtagaaaagttgaaggactgttcacttgcaagaattcattggttttatattttaaagacttaaatgatccgggaaattgctttctcggtcccatgttctgtctcaggatagcaaaatatatagggcatccctgcgattggacacagacttctaaaatcaacacgatgtttctaacagccttgttcactgataccctcaaccctatttggtagtgatcatgaaaaccctctgcctttaacagtttattttagaatatgttgcatagctatttctgaagctgtttacatggagataatgataaatatgcaccaagtttcatgtatggaataaagtttcataacttggtaaacagatgttgacggcatggaatgatgttttgcaatcactgaaaacagcagaacttctgggcttgggactctggggttgaggtccccttatgcttttgattaccacagaatgtgagcctacactggaatcagaagaataaaattgtgccctaaatttagattagagaaggatttggggctggttttgtgtctggttaaaccatcatcacctaaaattattgtttcagtgtgtgcttcctggaaatatgtatcccagaatattttttgaatttttatttttagagacagtcttgttctgttgcccgggctggagtgcagaggggtgcaattatagctcactgcagcctcaaactcctgggctcaagtgatcctctcatctcagctttccaaacagctgggactatagacataatcatgcccagctaatttttatattcttttcttttttatttttagaggtgaagtgaagtcttactactttgcccaggctggtcttcagctcctggcctgaagccatcctcccatctcagcctccctattagctgagattacaggctcaagccaacatgaccagctcttccaggaattgtgtataataatttttctgccacggtatggctgtggttgagaaaaccttcactgtgccttcacattcaggttggttaggtactttttagactaatgagttcatgcattctctggaatgagtagagaaatgttccttgaaaaccaccacaactatcttgatcagatagagctgtcatacctggtccctggaatacttgtgcttttatattatgtttctattaatattttataacactactatggtttttttttatctaaaagcagagagaactgtagatgttctatgcctctggctggattgcactgttacacttaaaatctctattacctatctttcaagagaggcaaggaaaaaaaaggaaaaaaaaatacgctggctaagttctctcttctttatcaacagttttctaagttatggagataacattctttattatgataattatgcccatgtcttaaaccaataattaaaatagaaaaaaagcagtaaatatgtattttcaaaaatagtagaactatgacttctggatatatacataacaagtttaagaatcatgatgaaaagacatatatgtgtattcatacacatctataagctcacatacctattcacaattattcataaagttagcatagttattgcctttatctgattccaagataatcttcaaagaacccattagctttagtagaaattcaaacattagtcatcatccacattaagagtttgtaagagatggaattcagagagtcagatgtgacttaccgtggtggggaggcctggggcaggatgagattaattcatctccagtttgagggtctttctagtttattgggatgccaaggttatgtgttttcaagtcaatgattctcatatgaggccaggaaggggagttgctggaaaatgtttaaacaatcctcttccctgccctttcctttccttttacatgctttcccttaccttccttttcccattcctctttatctccaccccatttccttctctcttcttgttgatggcggtggcccatgctacgtgttccaagccggaaattaagagcactcttgactaaagttatacctttttctttgaaaatttacttgtttattcctattctagactatttccctcgaattcaggcaagatcaggagtacaagttctaaattttataaggttcttcccccaaattttagttctgtttggaaccagttcttaaatattttaatttgtagatattgcctccatgtgagacattctcatgtgccttcttgctctatgtgttgtggaatgaaaatgtatgtaattcagtacttcaggaaaatgttctttcccagagggaaatgctacctatggccaggcacagtggctcacacctgtaataccagtgctttagggggccaatatgggaggattgattgaggccagaagttccagaccagctcttcaaaatagaccccttctctgcataataataacaataataataataacaaaaattagccaattgtggtggcgcacacctgtggtcacagctactcagggggtgaggctgcaggattgttgaagccgaagattttgaagctaccgtgagctatgattgtgacactgcactccggcctgggagacaaaacaaggtcctgtctctaaaaaaataaaaaataaagattatgtatgctgggcacaaattgttcctggcatctttcctttagtttcctaacttaaggcatcaaatggagtgtagatggcacaatctgatcttggagtaccaatgttgagaggtaggaagattgtaatatttttcttgggcccgaaatatttatactccccttatatacttcttgtttcatcatctattgtttctcctcataacattacactaaaaaaataaggaaaataagggtatgtctgcattctgtcaaataaatatcttccatttcaagttcaatttgcatcctaagtgtgataacaatagaaaaaagccataatggagtggagtgatgtcgtctgatttactttacaccatgaactccttttcagataaatgtagactggtcgtgcccctacaatacaagtcttcattaattagttatttaccagttacttattgttaaaccaccttcccttaaatgataggtagtgtgacctattttaggaggcactgttttgggtccggagaaaccactctttgttactaactgggttctgaacactctgaaatggcaaaaagttgcaggcagggaacacatatgtcacctttatttttgacagtagaactaggtgtgttaaaacaaatggctttgccaacactaaaccctagaatcagactgagttacccatgtcagggtagcatgggtccaggagaagttccctaagatggggaaagtagtgggagtggacagcccgtgggcaatttgtacatgaataaagaagggttcccaagaaggggagggtcagggatgaaaggcacattcttctcggatatatcaatcataaagatgtcttcatctctccagaggctgagtgaataaagggttagagagaggtcagaaggacatttaggggaaagtcattcctcataggaaacagtagtgagaaaaaagctcttttaataccctagactactaaaacaaaaataatttagattctggctctagcttcctaactaactagctctaaaaccttggattgtggttctcaatcacatcctctacagaaaaaaaggctgtagagttggcgaattttagggcctcttcctttttataatacaacaaaattactgtcatttgtcatttgttgagcactagtcctaggcactgtgtcagagcatcttacactctcctttatttaattctcagaaagtccatcactctataaaaatccagagggttaaatgatggtttatgtcatacaagttaagtagaatagtcgggattgcaactcaaggtcaatgagtcactctgctctgctcatgatatgtgaattaaggtgccatacacaatacatgaagaaagaagcacttggtatcttggtatttttctttgagtctatcagccgccaaatatttctcaaaattactcaagatttatattacaaccagctattgtagcacaaaatagaaattgaatatcttccccaatctgggagaaaagagctcagaaacgactcctacttattagagattactgagtaaagttgcaaattgatgaaaaagactagactctgtagtaatacatcctcagtgccttcactccaggtaaaaaatggttcaccgtaagaagtcacaactgtgacaataataatcgtcattatcatagttgttgcctgaaagatagaattctggacttaaaatctttattttttctattttgaatgaaaccattccagattgagaatatttattctttagataaagaaactttaacataattctttgcattaaatagcagaatctgaatttaaatttggggattgtatatttttgatttaaaaaataagaaaattactttccacttttgaataatttttcctttaaatatgtgagaccctggaatttgaggcagtaaacaattgcatcgcccagagttttctggactccagactgtaagacactgaaaacaaaggtgagagctgagcttcaaatgctattctgatttttcagtcacctgactgtagatagatagcttggggactcgctgagtcctgtcaatcagattaaactcacagacagaaagaacaagaaccatgggcataatgagtagttgaagacaggaaacattttattagatcagctctgagacaacacctatgcacatctgatcaagaattcagtttgcttctgattctaattctgcagtaatctagaaaccatgattccagccagcactgatataagtggaaattttagcatggacagtacagtattgggggttatggatagagttccatgatcttggaatattctctcataatgttgggagtggcagtatggttaattgaactgtcatgtgaaacctctgctcattaagggcctcctggtaagtggaaacccttttcctttagtgaatcgcatgtagcacactaactgtatgatgagaaatttgataggcagcttgtggtgaactcaaagaaaaaaaaattaagaaactcaatggaggcagggcacggtgactcgggcctgtaatccaagcaccttaggaggctgaggaaggcggatcacttcaggtcaggagttcgacagcctggccaacatgcaaaaccccatctctactaaaactataaaaattagccaggcgtggtggtgtgtgcctgtaatcccagctactcaggaggctgaggcaggagaattgcttgaacctgggaggcagaggttgcagtgagccaagatcatgccgctgcactccagcctgggcaacagagcaagagtctgtctaaaaaacaaacaaacaaactaatgaacaaacagaaaaaccaaatgtaatggaacaaaaatgtttcactggacttagaaaatatgtaggcttaatacacccatcagaaaatacattctatgaaagaagggttcagaaagatagtggtcagtaatacagtttcaagatagcaggcagaaataaatatgaaaattatgctatatattaatgcttttcatagcacgccaaatgtagtagctttgtcaactctttaaactatattataaattgttagtcatcgaaacataaactgtcttgtatatacattaaaacagattttcatggttaagtagattgtgcattaaataaattctagggtagagttttgcttgattcatacatttgggacagaaggtgcatatgtattgtgttttcttgtacttctttctctgttgtctataaaagtgagggggtatgcctaagaaacacctggatgctcatagctccttatagctcatatttggatttgtaaaatgtttacagctgtgaaaagtgatacttcagtttataatcagcgtttatttcttgcaaaacaaatgaaaattaggttgttatcttttatttaggaggcagaaaaatttgatctactatgcagtgaaatttatgggaaaagaagtttaaattgtgtatttttaaacacacatttaaaggatctcggctgatttcttgtcactggagcaatggacatagtatgttgtttactagcgatattctttgcctaaataaaatttaactaaaattgaatcagacaaaacatatgaatcctcacatcctatggctttctagaaggcaatgtgctatacaggactgatgcctatttcattttgctattcaatgtttttattaatagtagtttggagaatgtcgttgactctagcaattcttaggatggggccatctttatttctcagtacttctatttttctaaattttaaaaattacttgctcatcaaagcataattgttaagtctaaaaatcactttaagaatctagaactagaaataccatttgacccagtaatccgattactgggtatgcaccccaaggattataaatcattctactataaagacacatgcacacgtatgtttattgtggcactattcacaataggaaagacttggaaccaagccaaatgtctatcaatgatagactggataaagaaaacgtagcacatatacaccatggaacactctgcagccataaaaaagatgaattcatgccttttgcagggacatggatgaagctggaaaccatcattctcagcaaactaacacaagaacagaaaatcaaacacctcatgttctcactcataaataggactagaacaatgagaacacatggacacagggaggggaacatcacacacctgggcctgtcggtgggtgggagtcttggggagggatagcattaggagaaatacctaatgtaggtgacgggttgatgggtgcagcaaaccaccatggcacgtgtatggttatgtaacaaacctgcacgttctgcacatgcaccccagaacttaaagtatattaaaaaagaaaaacagaatatccaatcctcatttccaagacttctccaaagctaacaatttttgtgtaggctgtgtttttgtaaagctttttattctctctctctgtatatgtacacacgcacatacacactataatatacaaatgtatattacataaagaaatgtttgtttatttgcaagtggttatacataaaatatgccagtctacataattttatagatcgtatttattaattttataactttttgtcatattaattcatatggatctattccatcctttttatctgttgtaaaatatttattcatatgactatattataatttatagtctccaactgatgaactttttcattgttctcaatttttcagcgtccaggtggtgctgaggtgaatattgtagaacgtgaaaggatgtttaggtagaagggactttgagaagtgaatttaccttgtcataaagtgtgggtattttaaatattcacatatatagtggctgttaaattccatttccatctgcagtatgtgagaatatatttttaagttgccacatgattaactttaaaaaagtttgccaaatggatgattacaaataatattttgtaggttataattacctattactaaggttgaacactttttaatatttttattaaatcgtattttctttgttagtaattgcttatatactttgcttattttctattgagtcatttgttctttctttttttatttttatttttttgagacggagtcttactctgtcaccaggctggagtgcagtggcacgatctcagctcactgcaacctctgcctcccaggttcaagcaattctcctgcctcagcctcctgagtagctgggactacaggcgtgcaccaccacacccagctaatttttgtatttttagtagagacagggtttcaccatgttggtcaggatagtcttttaatttgtaggagttcttaaatattttggatagtatttatggtacatgttgtatatattttctctaaatctggttttttttttttctatgttttgttgctaggttgattttttcgttaatagactatttccgtagggttaatatttacagaaacattgagcggaaagtacatggcgttctggtaggcattatcatccccccatccttacacatgctcttgctttatttttaatttctttgtgatatctcatattaccaggagcttttcattttgatgtagccatatttgctaatcttttattttacaagtattgtttatttgtttgtttgtacttacttgaaaaaaatctttcctatctaaggtctttaaggtaatgtcttatattttcccttttttattttaggcgttcttttttctacttaaatttaactacacctcttttcaaatttgcctgtcacctcacacatttttttccattgagtactcataccctagttacctcaccattcagatgtcacttccatgccatttcttcccctgagtgttcttttgttcttcaggttaggagcaatcttcttgcctgccagagagtcttgcaaaaaaaaaaaaaaaaaaggtgattttcttttcttctccggaagtttttatattgtacttaaactagtcaagacagtattatgcttgtttcagtatattattcttccaaatagttcttgagaacaagatctataaatcttgatatccccaaagagtcctactcagtgtctcaaagaataagtttaccattaacttttgtaaagagaaaaaaaaatgtatgtttagtttggacaactgaatgctcatctgggacacacagtaattatttccaaatacttgaacacctatcctaggttaaaggaattgaagtggtcctatatggtcaatagatcattgctaagggcaactatacagtatttttctcaatacgaagaagaaattttcagcaaatagaattctctgaaaattgaacgaactcacacaggagtgacttgattattcccagcctcattcaagcagaagcagtgcattaatatttcttctaaagccctttgtacacacagtagtcctactgaaggaatgaatgacatattagctctatttatatgcttcgtgagttttaattttaaacattgactcttgatattggggtttcttccccatctttccagacttcagttacacccatctctggggatcattttatttttctttaaatatgatttgctttttatttacaaaaatgcttagggtatttatcatgttgttttcaccactcaaatagatgattttattttcattttttgggtaataacttacagaggttaaatgacttctaggaggttcaatattaaatttatttaactgctgaaaccttatctacaaaaccaataaatacacatactgtgctgagaaataaacgtatgtttaatactctatgtactctttattaaattgatttatgtttccaaatttctgtatatcaatattaatgtagacattctaggtgagataaacataacatgttaaaaacagaaaaaaacaagtcagaagcttgtgattccatattctactttttttttttttttttgagactgagtttcactcttgtaacccaggctgcggtgcagtggcacaatctcgactcattgcaacctccgcctcccgggttcaagagattctacctcctcagcttcccaagtagctgggattacaggcatataccaccacgcccggctaatttttttttgtatttagtagagacggggtttcaccatgttggtcaggctggtctcgaactcctgaccttaggtcatacacctgccttggcctcccaaagtgcttggattacaggcatgagccaccgcatctggccccttctttgtatctttaatttagactctaaactaaatggcaggaaagcagcattttgacaatgctatgtatattgcccagaatatggatgaaattttagtaaatgtgaaataaagcataaggaaagccattacttccagacagaaatttgtttattaactaagaactaggacattttccagagtcagaatgcaataaattggcaaggcaagatgataggagaatcctaaacgcagattacacataattgtaaagggtctctaacagtatttgttcttctttcaacaaataattttcatgctttagctaattctgaggctttttcttaggcatggagaacaaaagctgagtaccagtgaatcttgttttatggcttctctggaagagaagatttgctgaagtcttctatttttgagctctagtcaccattgctatttgcctgttcttacaatcaatcagtaagaaaaggatgaaatagttcaacttattatgctcaagatagtgttttctatcggcttattagcaaggtgctagttaggtagttgacaaaaatattaatgacaatcaaagccatccgaatgaatttgcatgctggaatctgcagtcaaaccatggaggccccatttcatcaggaaaggtaggtgataatcacactgtcagacaagtgacagtgacagccaaagtaagaaagccggtgatggttgtatttcaaatggagtctcttcggtaagtccattgtaataaatctcagaaataatgatgttaccttcagggtcagcttttagtacaaagagcaataacagaacaacagaaaaaagaaaacctagcaggtgatactggctgtggttaataaacctgggagttgtatttgaacttaatgtaacaagattcttaggctgaataaagagattcagcagaaaattagacgttctagtacttagtagaatcttccccattgggcaatttccagctgctataaattctggaagttggtcaatagcatttcagaggtctgctaccactgcacaaatacctcagaggtggaaaggtactgggtatatagctcagagatctgaagcttctagataaatagctcagtggtcggcagctcgtaggcctgtagcttgaatagtgataatttctcactaaatagctttggggttggcagctgttggaaatataacataatggtgagacgtagctgggtatgaagcaaggattttggtagcttttataccccaaagtactcaatctgcagtggtttagagtttggaaactcttggataagcagttaagttgtccaaagcagttggaaccgttgcggagggtttggcaggctttggatgcatttcgagtgggtatgtggcaattgcatacatacccattggtctgggtgcttgggctgcagctggggctggggctgacgttggtagtttcacagacactgaagacttggcctgctgatggggagttgcagggcacagaggagtttgacgggtcacaaccagtggtactgcaggtcttgggctcacagctgggagatttgcaggttggtgcttcaccgtaggattcttggcagtaatccaggagccagagatttccttggtagctactgggtaagcagtgtccaaaggtagggcttaaatcactggagctaagagtaacagaagaggtcactgggatataacagtgagttctgtatgatgtggtactgcagaccccaggatagcctgtagtagacatggagcctgcaggcatgctcagtggtcgctgtgcagtgtgtctgtggcctaaggacgttttataccttccctggtgattgtcaaaagcctctccagactctttcttctgtctgcttggggcaataacacagcaacatctcattagtgtgttggttagccacagaggctaatgttttcacacgtgtaaaaataagtttattttaattcttcaaagtatccataatcaccactttgaccatcacccatcactcatcatctgtagaccataccttcagcaaatagtgattttcatgttaataggcaaactctcatctgtcaatcagaggttaacaagagttcatgggtctatgggcttctgcaacatggttatttaaaggttcacaaggactcaagtaaagcaagtaacctgtatttttccacgctgttaactactggaaaacactgaaggacttaatcatatactctgaaataagtcaagtagtttgtctgtctcaacatggttactcaaaagcaggcattgacctttcaagaatcagttttccaaatatgtgctatactcttacctgtgcagggccatatactggtaacggcttctcatgtaatgtattaggagaagttcataggtaagactcacagcaatacttgggaaacttggtgaccaacacctggctaaaaatgaacttgttcccagggggcatttgttgctaagcaaccaagacttctgttaaatcccttcttaaagagtgtcggcaatatgcactatcaaataaacccagctttgcaagatgataccttcctaattgactaagattacatatcacatgttccattgcctgctgtaaaccccaattgctgtcagatgtaaatattttccccgtttttccccaaataagttctcttattctttatttgctttcttttgcacctacactttattttactcctgtgttgaaaaatgcagttatttttagtttatgtcaatgaaaggaaataactctttaaaagttttatctgaataaactgtatagttcttacaagcactgtatatatgaaatagcactttttactactcagggtgaaggctaaagaatttttttaaagattttaatttatactgaagaactgaaattttgttcttcaaatataaaattataatttataattccagcctctattgaattggaaacagcaatgcatttattaactgtgaagagttcagacagagaatagaacagtcttcttcaggtataatcagctatagggatagttttttaaattaactctctttatagcaaactatgagatttctctcactgttttcggttacttttcagtcagatttttcaaatgcacagcaatttaaacctacagatattctcttttttttaaaaaagatctccattttctcagtgcttttctcagtatttgttctgtaagttgacaataagcaattctgtattaaacatgttttgctgccttctgcagtatctctcaggtgacaaaggccacaatcatgaaactgtatttccagtaaattgtttggctatagagagccttgggattttgtgcggaaaatgttagtcctgaggcaggcaaaataggaaagaagatacatgggcagttagttgacggccaactttccgctaagttactgagccccagtgatacacagaaaagccacaggttgatgaagctttatttctacagttctctattgtatcattgttgcctctagtctttttttcttaggcatccttgaagcaggtttgagggctaacaccattaacaaacacagaatgagttaagtcagttactgtaaagctcacattcttcccttccatcttaaaattaaatagtgaggtattttgaattaatttgattcacacaggtgtaagtctaaaaaataatgtggaacatcatatggcatgaccaatattcaaagcatgagccattagaacatatttaaattgattttgctatgataatattctaaacaaataaacaatgagatttgagaaaggaaccctagctcatttcctctcatttgcttttgtgtttcctctccttccttactcagaacatcacacacctgtagaaacaacatcccatcccattcacaccatcattttctgtacatgattcctctgcacaattgtgtcctactctaatctcaacctttgaaagagatggagcacaccgcatcagaaatatagcaaatatcaggttcatagcgatggcaggcttgagtagaaaataaagaccattgtcgtttgagtggcatcgtggtctgaaggctttggagagtcatatgcatttctctgttttcacttaactcctaaaataatgttttcttccattaattcccctgttattagtatttgttgtgtgcggaagtccgaataatgcacccacccaagagggtcacattccagtactgggaaatctgtgaatgctacgtgacacggcaaaaagggactgtgcaggtgtgattaaattaaggatcttgaagtggattatctgggtgggcctgatgtaatttccagacaatatgaggatggaaacagagtttggaatgatgtggccacaagctaaggaatgtcagcaatcgttataatccaaaaaaggtagggaatgtatttctccctggggattccaggaggaatcagcactgttgataacttcactttgggtcagcgaagcagcttttgaactgtagcctctagaactgtaagaaaatacacttttgttgttttatgcctttccattgagtttgtggtaagttgttacagctgtcacaggaaataaatacactatgccagaaaagtgtaggaaaatataatagatagtccttatgtagtttgagaagtttgcactctgtattcagggaaagtttaagatgtaaggaatgagcttcctagctatcagataattcagagagataccaatactgtctgtggaatacgcaacaaacttcctgtatctaatgagccagcagactcctttcctcattaaaaaagagttgtggaattctttcccagttttatccaaaggttaaaaatcctttagggtaaacagaagatcaaataaagctaaattttccagtaaatggcccttaaaaaaagtaatagaggacacttttctagtcttttaggtcaaacaaaattttatattcccttttgctactatatatgcagtaatgtatttttccacttgccaagatggtgttaaattaggcaaaactgatcttatgactgaaaaagcaaaatgtttgtgaatccatacttaaataacaattgaattgcaaatattgagtcaaaatgattcttacatttagcattggtaacctaaaatattggttacttgctgtttacaagtagcatttatattgctgtaaatgtaatgcagcatttacattgttggcttaatagatcgttagtggtttaagaagctgaagaacagatgagaaatataaaaaattttaagaaacagaaataaatgaaggtaaagcctttaaaaaatgatagcacaaatgggtggaaagaggaattttcatgcttaaattcagggaaacatggtatacatgtaatgaaatacaactgtagtaaaagttaaacatttttaaatggaactgtcaggactgtgccctactgagttatgcattactgtcttgctgactaccatttaaatgtatttattagcatgtaccttggaaaattgttctctctcagtacatcagtatcttaaataaaactggagctaatagcatgtactttgcaggactttcctgcagatgcaatgagataataaatatgaaaatacctagaaaagtgcaatggacatagtagatgcaaattaaatcttttctttctaattttctaatgctccactttagggaattccggtcaccaattagactaaaaaatattatttgcaatttactttgatgttgtaaacacatagtcctacaataatcattgtgtcctttaaaagtaaatgctaaaaatgaacaattctaccttgtgtagttaagaaaaatgacttgcttgacaacaggctactaatgactcctcttgtataactcaaatccttcagtgtcatatatcattagctagttcctggaagccgtatatgtattgctagcaataaaggctcaatgctcaaattccctggactctaatcctgtttctgatgctcagtttgactaccacgtgtttctgtaacttaatttccacctcttcaaaataaagctaatagtagtatttgctccacaggtggctatgagaattaaataggtagctgtgagaattaatagtagtatttgctccataggtggctgtatttattaaattaaataaatactactaatagtagtatttgctcaataggtgggtgtgagagttggtcaagcacagcataggaaatatagttttgtgtagctgatgttttgatgttaacctttatcattatcatcagcctataatatttgttagtattattattttttattgtcattggatctcatctaaaacttactgcattttgtatgtgtacatcaaaagcaagaagaaagaaaaaataaagaaggaaggaagcaagaaaggaagggatggagggagggaagaaggaagggagaggaagaaggaaggagggagggaggaaaaatggaaggaaagagagaggaaagaaggaagaaaggaaggaaggaaggaaaaaggaaggaaagaacatgccagaataggctgttttaggctaggtaacttgctatgatgtgtataaattatatgttgatcttagaaattaaatttggaggaattgaataagttgaaggcatttaccaccatttatatgggaaataaggatcccagagagggcatactccataaaggtacacaccattaaagttagtccagctagagagaaaggctgggtggggctgtggcagagaggaaatacttttatttgaagtttagatttgtcattctagaattgaagattatggtcaccaagtaattgataacttccaagtggcttctagattagccaaaacctgaataaataaaaatagagataatatgaaagacaatgaaaagtctttgaactataacttatgtgggtcttctggcaagtttcttgacctatttgaattttcttatctgtaacaatggggatgatagtatcttttcatacgtgcattgggagattattgatcatgtagtggtatgcccggtacattgaagatgatcaatatggtggaatagttattggaatatgagcagttgcttgtaagaagaacaagttcccagtgagtaggtggaataactgaattaattagttacatacatataagagagaaacaagttcaaagtaataacaattttctctatgcaaggatccacgggagggaaggggggaggacttaagtttcattcaagaggaaaaaatattgtgctgtccgttgtacagaactaaaatttatgtaacccctttgtgcttaatcttgtggggcaggctgggcattgtaacttgttctgttcaatggtaatttagaagacatatgcagggctgatgagcaattaattttccttgctattttctctctgcctctactggcattattcctgatagtgaagatcctctatgcctgggtcccagaatgagaatgatttgggagctgaaacaatgaatgtgtagtaggggtgataagtagaccattccaattttaagcatctggaattttgaagttgttggttgctaaggcaaaatgtagtctatttgggctaaataattctctttttaactgttagaaaatacaggtgcatatttaatgtttaagtagtaggacacatgcaatcagattcttgaaaggatctatcttgcctgcgtttttcagatactctttattttctttcttttcattatatttgtttagtgaaactaacagtccttaacttcattgaagataatgaagaaccaaaagatactcttttctatataatttgaagacagtttacttataaataaccatgaaaacttgtcttcctattcaaggacatattattggcatagaaatcaagaatcgctggcagtgaaaattttctagtgaagaaacaattacaatctcttagaatttgatcaagtaaaatggtacaggttaaaacagcacctgaactataaacacaatggtccatcagcctaagaacaattcttcaacctaaagataaaatttctgtaaaacgctgtcagggcaagacactgaaaagacaattcagcatgttcttctaagaaatggagattgccaacccacaaaatcagaacaagctggttggaaactgctgtgcatgaaggaaataggttggaaactatgagacacataattcagggatctgaagctgttggatatagaacctatagtttgattaccataggagaaatagctcaagggatagcaggtcctggacacaaaattcagtgattgacagcgacaaaaaataaagctcggtgattgacagccataagagacatggttttgggggtggcaactactgaaaaaaaagccttgagatctgttatgcattgaggattggcaggaacttgagaaataaggattgatataaaaacagctagttgagtggcaaggtctggagacacagtaagtagtagaaagcagcaagaaattttacaaattgcatgcacacaactggatgaatggtagctggaaggtttaccacatgtctctggggagttttctagaagtcaaattcagcgttggttggacaagcacagagcatggtcccagtttacacaagtaggccagagtgcagtggatgaggtgacaagaacatggcagtaactcccaagacaacagaagttgtagtttccataatagcagatgctggctgacatgacagagtctgaagtaaggctttcattcagataagtaacaaagaatagcttatctaagtctacatcaaactagaccaggttgcttctacaccttgatagctatatactcagactctctgcctccccatattttagattaatttgcatcataatatctcatgaacttagtgttgtgttgcctatgaagataactttcttcccattcataaaataattttggttttaatcttctatatatctacagttgtaatctttctcctgtttatcaggtttcagaatgtgtgtgatgtaatcacttgtgtattttatctgctttgcttctgcttccactcctaaataatgcttaattaaaaggagtccatttgaatggatgtttatcctattcattatctacaaggaaccccacagttaggaaggcatagtcctcatcctggaagaagagatacaatgttgcaatgcttagaggaggtgttgatgtcctaaaatagtttccatatatcaaagtttcttggattttccagacaaaatatctcatgctattcgctgtttttcatacttagctgagaatctaattatgtgatgttgctatctgtatattgtcttgagagtcaattttatataagcatgttagggtacattttaaagagctcagctttgacaacttaatatttttcatacttaaaagttgtgtttgatttccaaacacttgagaaaagacatataatagttttacatggtaacattgatgacatatgtgcttttatactagtgcaaatgtcttacatgtacctgtggtcttcaaataagaggataaacatgatatcaatagtcatcagcttgtgtactagctttccagaattaatggatgtcttcatctgaagcaatttttcaggaggaccaatttggtcttcatgcaatgagctaaacaaggattatgcaaaactataatatcacataaaaaagatgtccgaagcctgcttacttgaatactatggaaggaacaacaatattttggattcttccctaaagatgcaagttaatgtttacaggcatctattttctggagtctcttgtcttcccaaaccaacacattccattctcaatcatcttctcacttatcagcagtgacggagttgttcatgagcagaggacactaaagattccaagtagccacttggcatcttagagtatcattgatgatccttctgttgaatactttcctattgtacaatagtcctgttgttcctgcattgttcattgaagattctggaagactgattattattttaattttgcggaaaagatattgaaatatctttttaattggaagcttttacggagcattcagaaaactgcagatatctcatcacccatgcaaacatgcacaaaggaagaaaagaaaacagagagagacagagaaaacacacttatgatatattttgacatttatttacataaacatgacatttggtacagatgtagtataaggttcttcctctgaatttcacattttttgtttcagacagtgaaaggaaaaatgtttgacatttcacatggggaattttcacagtcgattgctacattcttgttaaagaaagcctcagatcacatcaatgtaaaagaggactgttagggataaaaaggaacagaagagattggaatcatcaaggattgagataagtttgagaatctgtctgacatttttccatcttctctgagaaccttaagcactccagataagtgaaatctttcaaatccttatatgcttccaaagaagagtcctccaaagtgaaatattttagttgaggtgtgtgcacctcccctaaatgcctcataatttagttgaagtttatgttcacttcttatattctttgtaaaatttgaaaacaagtggtaaccaactagtctataaaatattttcctcagcatattggcatgttacatgagcgttccaaaaccaaaattaaggtttttctttttaaaccatagtgaaaacagatttgatctcaatagaacggctattgaaatatatctggtaactggaaagtcattagggccacagttatcaaactaaatataatcccatcatttatcatcagtaattaaaatttaagttagatgtggggcatgtaaatgagagaaacctggtatcatcaaacaatgtattgcatcttgatgacaaatgccagagaagccctatacatataccaacctgatgcgtgtcctgatttattatttctaattccatttataatttcttcaaatgcctgtagagactaatggttctttaagtttaaaacatctccatgtagctacctggtttaatagcctgagatcaaaaaagctactgagaagttatatattttgtttgaaatgactggtggaggatatgatgaaattaacataaagtaataaaaatagcatttaagagttcacattttcaccttgggaggctgaggagggccgatcacctgaggtcaggagtttgagaccagcctgaccaacatggagaaacctcttctctactaaaaatataaaattagccgggtgtggtggcacatgcctgtaatcccagctcctcaggaggctgaggcaggagaattgtttgaacccgggagatggaggttgcggtgagccgagattgcgccattgcactccagccagggcaacaagagcaaaattctgtctcaaaaaaataaaaaaaaaagagtttacattttcattctcacatactaattaacatgctaaatcttatttagagtttataagtctaatacatactccgtattttcattggagttctttgtgaaatacagattttaatgactcctaattgcctatataataaagtacacactcctgaacgaggttcagaaaatcttcaatatctgggatcaacatgtattttcaacttctcttcgtgatcctattccaaaacccccatatttccatttcaatttaatgttcaaatttcataaaaccctgctttttagtcacagaaactctgcataagctacacccttctggaatatccttctctattgtgcctctgcaaattactttacatttttaaaagcaggttacaaatggctctcagagacattttctgcatctctttacccatatccatgcattatgccttaaacattgcattttattttctcctgtcactatagaggttggaaaaaacgttcatattggcctaattttcctggttgtgtgtaaagatagggggagggatcactttgtcaattcctcactcatcctttcttagagatactccgacttaatagagtatgggtcccaacataatgatttataattattttgttcttgtcaaacgtatatcatcttggcccaggacgaatactgctcattcaagaatttaatagcgctattcagtacatcatcatatttgaaacatcacacactttcaatgcatgcaataggcaaataataccaaccaagaaccatatcaagaagaggagtgctcccacttctttcctttccttcttccttttgtctatagaactttattcaaaaactaattaatgcaattacacaggatattgaacctgtttgcttaggttcaatatctatgagataaagatattttatagactatccctctagtctctaagactttgacctccttgtggccacagatatgtcttattcgtatcaattttactagttgccagttccttgaacaacgtaaacagtcaataaatgtttttgaatgttagatgagtgaaataaacttttttttacactgagatcagatttttaaaaatccaagccacttatttgacattgttcctttgattttcttttttttctttattagccactcgaatttaatatctagagtcaaatttttgattctggtcctaaaaatttcgtctcctatatttccttatcttagtaagtttaaattaatctactcgatttctcaagccagaaatcagagtatcaaacatgattcttttatttctcttatttcccacttacaaacaataagcaagtactgtttctttcttctaagtatatctcaaatgtatctgcttctttccatatacgtgatctcatcgtaaatcctccaagccttcctcattctcacaactatacatcttactgatctgcttcactctatccttctactctatttctcttctaaatttcttcctctcattaagtaaattcaagtttctgacctatttcattttcctttgttccaaagaatttcttttaacatttcttccaaggcagttctcctggcaacaaattcccacaatttctatttttctgaaggataagttcactggatacagaattgtaggttagttgtttattattattattatttatttccataggattttgggggacaggtagtatgtggttacatgagtaagttctttagtggtgatttgtgagattttggtacacccatcacccaagcagtataaattgaacccaatttgtagttttttattaaaaaaaactttcaatattctgcttcactttttgcttgcttgtatgatgtctgatgagaagtctaatgtgattctcattcttgcttttctataggaatgatgtttttcttccctttagtctctttcaagaatttctctttgctttgcttttctgtaggttgaccatgatacacctagctgaaggtattttggtatttatcttgactggtgttttctgaacttcctagatctatgtttttaagtgcctattattaattttttgaaattctcagtcattattgcctcacatagttcctctgttactttattttttcttctgatattctcattatgtatacattacacatttttttgtaattattttacaaagttgacctccaagctttttaaatgctgcaccagaaactgacacagaaactggaagtccagaattttttttttctttttttttgagatggaatctcactgttacccaggctggagtgcagtggtgcaatctcgactcactacaacctccatctccctggttcaagcgattctcctgcctcagcctcctaagtagctgggattacaggtgcctaccaccaccctcacctcatttttgtatttttagtagagatggggtttcattatgttggccaggctagtctcgatctccttacctcaggtatctacccacctcggcctcacaaagtgctgggattactaccacgcccagcctactattctatgtagtagaattttttttaaacatctatttttttaaacatctctgtaatttacttcatgtagctatagaactgaaaaaaataattgctatgatcattgatttaggtgccctaaacagggacaaagtagtctgaacattgtagggagtgactacaccttcccaagacagaggctccaaaaaaatggaaaggcatttcacagttgaaaatatgcctcttatatttatattatctaatcacattttcctatattggattatattttatattcatgaatggaaggaatcatttcaagttggacgtatgataaaattagtcacatatttcttgtgtttgtagaacatttttactgtttctattagctgtgaaccattcaattatgttgaattttaatcttcagtattgttacaatatgatgttttttctgcttttttggtctctttggagactagcaacataatcaaaattcactggtatatcaaactgtatcagagaagtaacattagtattcagttacgtatcatgagaaaaataatattgttttgaattcaaatttgaactctctcacttactagtaatgaaatttgggcatgagatttaatctcactaaggctgtttcttcatcagtgagacagaactaatgttaacaatctagcaagttgtaagaaaaattatgtttaatatttataaaaagcctggaaccagatatgtgaaaaaattatacattttttcttccattattttttcttcagggactggtgtaacagcagaactgaaatatttgaaaatcaaataaatgattgtaaaataaggcatatgttctagaacaggtgaatgtggttttgaatctcaactgtgccctaaaactttatgtatgtatgtatatatgtgtatgtgtatgcgtgtgtatctctatttatctatattttagtttattcttggtttattctgaacctgtcttctcgtttgtaaaaacataatagttttggtacaggagagtggttatgaggattaatgtggtcatatataagatgtgccaggcacatagtagttattctccatgttccccatccaatagtaaacacttctgtcagaaccgatcaaaatcaagccatggtacccatttatgagcatcaagttgatttgacaaaacaagtaactgagaaactggaatttgaaaaatagcaattttaggaaagacggctatagttctgtagttaaaatgcacattggaagtattggaacggtgtggtacaataaagcaagagcatcagatgtttgaattctgcaaaacaaagttatatttttcatagttgcatcagaactttatatataatgtggtagtagatgtagatgttctttttttgttttttccctcaattctgtctcaaattagtccctgttacagaaagctttagatgttctaccaagtctatgctctcctcttctttctggacacatgattgcattttatatgtaacagcctcttttgaggttaggaaaggccaagctgctgagttctatgctaaactgcaatggagtgcaacctctggggcaatgctgacagtcacatcatagtcaagtctctgtcaactaatccctgactgcatggagggcttctctgttgattttgttcctgcttactctaaatttactattactcgaaggatactgatttcaaattccatgtagccatatagtgcttgaacactttgacagtcactaagtcatattgctctatgtactttgatttttttcataggtcctttaataaattatcttctctacctctggaaacattcaatagtctccataattaattcagagtctaaaagtcatccatattacataaagtgattgacatatcttaagggaataactagacaaaaaataaggtacatgtaaatgataacatatgaaaaagtatgatttgtatgccaagatatgatttattagaaataaaatagatgaaaatagttttacccaaattgaaaaacatcaagctttaaaatactatacataatgtgtgtgtgcatgtgtgtgtgtgtgtgtgtgtgtttgtgtgtgtgtgtgtgcgtgtgtgtgtgtatgataagaaatccggaagcaaagaaaagttgttaagaatatttggtatagaattggaagagataacgtatctcatgtagaataagaagcactgatgaatgatctatcaaagccagtaagcatgagtttttgttccagctattcatgataattttctttcataagtatactgccagttgctcaaggaaaataaatatggctgaaagttgctctatgtatagcttatgggtctctagcagtcagactcgtagctaagaggttggcatccatagaacagatttcttaggggttgatgatcataggtcaggtagctcagtggctgacggccatagggaagggagttcagttgttgacagctatcagattggtaacttggaagatggcagttgaaaggctgtctacaggattctgaataataagaactggaactatgggatgagataggaagacagctagttccttgatgggatatggactcatcggaaacaatcgaagagtagacagaagggccgcaggcaccacaccctcaccacatgacttgtgacagttgtcatggcacgtgagctccacagctcaccttagttatgcagagagcactgggtgaggtgacaggaacctggtggggattccaaagggagtgagagctgtagttttcaaagcagaaattgccgttaagacatagtggagacagaagatcaagccttgattaaattgcagagagcaggttgctgaagtgtagttgttgtctatgtgacctatcgtttctatataccctgaatgctgggtgttggtttcctctatagccaatatataggctatagaggaaatcatttgtatgacatcttactagaattttacttaatcgcctaccaagcagtcctcccaccaccgtataaaatatatattatcaatatcacatccttcaaataactgtcattccaaagtcaatctggtcttccttgcttaatctttcttacagtataggtaaactgcttctttagaaatcatgttcctttgtcagtcttgacaattccttgaactcactgctaaaaagccacagatggatctccataattggagagaatttctttatggccactttttttttcccacagaaccaaactatctatatattaacatttaaaagtattagtgagatatttttagaagagctaaataatgaaaattcttaatttggaaactgaaccttattttgcattcttctgagacataacctagatccaaaacctaattcatctctggaaaatttgacatcattttcaagtgtgtctttccaatgaagaatgttggcctcaaaagctttgacaagctttgctaagatccacacccaatgagcatataagtcactgttctatattttgtgagcaagaaactgaaggtgttagcacacatgttttgataggtgctgtgtaagaaagaggccatcttgccttggatgcttgctaggtaaatctcagcatgatattgcaaatatgaagagaatgcttatgtttgtaacctgtttctatattactattttccaaggaatatattcctgtacataaaagattttgaaataattcatgtttttctaattagtttgctaagagaggccgtttaatttacaatgaagttttttttccaaaggtacactttttggttgattatttggattcagaatgtatttatacatggaaaggaagtgaaaattcctagactagtcttccccagagaaacatatttttagcctagtaacataaatgaactctacaactcaattttgaccacattaggataaatggatcttactacttccttgaggggtttcatttgaagggactacttagattatggcacctctgaaaatctgcttttggtagtacacattgcggtgggaaaatagtagatcttatctagaacagcattcctcctcctagttctcagtgtgagagtcatctttttcaatggtgaaggaacaagagctgacatttatggttcaagcaaatgtagccagaactcatgatttggagtgccaaatctagttataaagctctcaacataaatttcctatgtttcatttttcttgactataaagtgaaataaaatgggcacattaaacaccatttcaccagtatctttaatgatttaattttttaaatgtatatgaaaggctctgagcattatccacttagcataccctggatgaagcggcttatgcaaattagtctgactgagacatgaggcacagcgtattagtcagggttctctagagggacagaactaataggatagatgtatatatgaaagggagtttagtaaggagaattgactcacaggattgcaaggtgaagtcccacgataggccgtctgcaagctgaggagcaaagaagccaaatagtggctcagtccgagtcccaaaacctcaaaagtagggaagccgacagtacagccttcagtctgtagccaaaggcccgcgagctcctggcacaccactggtgtaagtccaagagtctaaaagctgaagaacttggagtctgatgttcgagagcaggaagcatccagcgtgtgaggaagttgaaggccgggagactcagcaagtctgctcattccaccttcttctgcctgctatttctagcagtgctggcagcaaattggatggtgcccatccagattgagggtgggtctgcccctcctcgtccattgactcaaatgtgaatctcctctggcaacacccagaaacacccagatacacccagaggcaataactttcatccttcaatccaatcaagttgacatttactattagccatcacacacagcaatcatggccaacatagaattgactgagctggttttctagattgctgtcacatgctgcctttttcaactcagcttgtggaaaagggcaaaccttcccccacagaggagagacatttcttagttgagggtacatgagtagctgaactttcttgctcaaagcctttaaatctctcatggctcatttatgcaaattcagtaattagataaagtcttttccctatttgagacaacaggaaacttccacactagtgttgagtatatatcagttcctgtgtatgcatattcaacagtcatatttatatgaatcccaatgatattggtagcactataaataccttttatgatctttggataaattggaaatcaagtaagtcaggttgtaattatttttgttgagtgtcttataactagcaacatacttcaccatccttgccttgaagagtggaacatttatttttaaagtttggccaactgaccattaaatttaaaaaatggataccagaggcaacatatctttcctaatcctgcaaagagatgttctctaatgatttaggaccctcaaaccaattaagttctcacatacccacaaaagttcaagtgtcttcatgattcacgaggacttatcctttatatttatcaatagccaacaattgaattgtgctattgtgtgagtggattgattagccatggttagatccccatcatcagatacccatgacataactaactgggcattactgtacataaggcctgtttttcctttttttgattcagttagtatacaagtctatatttagtgaagtatataatgctgatttacctccaatatactatattttcaagtacatgtatggacaaaaatgccacaagcgtcaaaagaatggaaatgttactatctttcccctgaggctataaaaacataaaaacaaacaaacaaacaaaaacaaccgaattatttgtagctccaactgccttctaaacctcggtctacttacaaggaggttgatttgttattttgggaacatgggttggtgcagatgtctaagtttggaagtaagatttagagagtgctgaacttttttacattcgagaatgagaagattttggagctcccagaattaatccgaatgtgagataactggagacaaaagaacacaggggctgaaagagttatgctatatgcactgttatatggccccactatttgaataatctttagagtaacattattgattcatttcttttggaaaatagtaaagggctatgtacagcttctgggtggatgatgagataactaaccagaatagaatcagttaacactgggccataatacccagggaattagtagaaatggcaagatggcataggatttcacagatcatggaaatggtagggatcagagtcaattatagccaaggatgaaaggaggacacaattctgcctcattttctagccctatctgtatttcatatcatgaaattataaagctaggggagatcacagtaaatcacttggttttctcattttatttagaatttgtttctctttatgtcattaggatagtttctgtttctgcattttgaaatttattaatattctcttctgcagtgtctaaccttctgttaaagccatttattgtattttccacctcactcattttagtttttatctctgtaattgtgatttgagtctttgtttatatcttccatttctctaacatgaacaaaattttctctagcttcttaaatatataaatacagttatattaattgtttgaatgtcctttcctaacaattctatcatctgcataatttctgattagttgtggttgatttattttctccctattataggtcttatttctctgtttattttcccgcttgttaacttttgattgaatgccagatattatgatttaacattttgtgtgtgttgtatatttttgtattcttataaaaactcctgtgatttgttctggaacacagataatttactcagaaacagcttgatccttttgagtcttgcttgtaagcatcattaggtagaactaaagcagcatttaatataggataattttagccccaggactgaaagaaaacccttcctagttttataccagttttctactctgtctgttgagaatataaactattctcagccatctttgggctccaattatctctcttctaattcttttgggtgtccctacactaagcttcatgcagtgtactgatggttatgactcagtgaaggctttgatgtatcctctgtagatccctgcaaccctctttctattcagttctcacaactgtctttcatggaataccgtgatttatttgcctattatccaaagtcctgaaaacccatgttttagatatttatctagttacagtattacttcagatggaagaataatcttgtctctgcaactccatcttgtctggaagcaagtccaaatcatctcgtttgaatctctgttttcgtacagataaatatccaataaataaagaaaatcaatttaccatagtttttgaaaataattaaatacagactgcgtattttgtagagtcatagagatagtttttcttactctaaagatcttgtttgtgttcaacaatcaacattcctattttatgttaatccactgtcttcacttatggttgttttgagtatgaagatcagtttcttaggatagctttcaagcaaaagaaataagttatgcttcactttaggccaacaagccccacttctttattctcatatatatataaaagttctcaagaaatttctttgttttttttaattgtcgttattgttgttgttttagaaaaatagggagcaatgttctaccaagagactctcaaaggatgactctggaaaggaaagtaatatctcagctatcaaatatttaattccctactaacgcaatcaaaaatgatattgtcattgcataattcttcatatatattgcatggtcagctatgtcttggatgtagctttttctcttctttttcataaatatttttattcaatgatatgtcaaacatgatatcataataattaccaaagtggataaagcattatgaaatataagtttactatgaagaatattttgatgagtctttaagcaacaccttcctaaggccaaaggctcaatgaatctgcaagggtttgtgatgtctaaaacattatctcctcacacggaatatatacacatatatatattcctcacaagaaatatacaggatgaaactagagatcttcttctagaaaaaaggagtgttcaacaacaaaatgaaacaaaagtatgaggtttgttaaaaagacacaagagccaactaatgtagctcttaatggtcaaagctggaaaaatttgagcaaaaaaaccacaggtaatattagattataacctaatgtattgtatttatgcatttatactgatataaataaataattgtataaacagaaagtagaagagaataagcgaatattcgaatgcagaaggactccaagtaatatacacagatactccttaaggaggtaaagaatgattcccacttaatatgaactgcacacagtggatttcttccaaaaaatacagtatgaaaagggggggaaaatgagtaacttcacagcggaatcttgatgaacactactgcagcaaagtgatcgaggttaacaccaatagtgattagtcatgttgatggcatatgctcttgatgtggaattttacctcgctggtctttctcctgcaaacctagaattctattctaatcctgagaaagatatcggccaaatctacattgggaacaatctgtaaaattcctgactgacactctttaaaaatgtcaagggcatcaaacacaaggaatatctgaggaactatcacagacaaaaatagcctaaagagacatgacaattaaacgtaatgtactatctcaagtgggatcctagaacataaaaaagacattagttaaaaactaaagaagtgtgaatgaagtatggacgttagttcataataataaatcaacattggttcattaattgtgacaaatatgaataccaatgcatgctgtcattaataggagaaaccaggtgcaggatatatggaactaggtattatcttcatgacttttctgcaaatataaaacagcttaaaataaagaatttatttataatgcaaacaataggttaaattctttactaatgaaaaatcaaagagatttgtttattttacatcttcatcagcttattccaaagctactgaggcttaacttttgtcaaataagctaacatttaattataattcacattttggtaccattcaggtactatttataatgcactttctcatatttcacctcatttaatttttgtgacaagtgtctgagtcaggaaggcaggtttgttttactgatgagaagataaatttaaaattttactcaatttatccacgtcacagaattattaacaagcacagctgagattataagtcagctcttgtgatagcttacctagcatttttttttttttttttttgagatgaagtctggctctgtcgtccaggctggagtgcggtggcgcgatctcagctcactgcaacctctgcctcccgggttcacgccattctcctgcctcagcctcccaagtagctgggactacaggcgcccaccactacgcccggctaatttttttgtatttttagtagagacggggtttcaccatgttagccaggatggtctcgatctcctgacttcgtgatccgcccgcctcggcctcccaaagtgctgggattacaggtgtgagccaccgctctcagcccttacctagcatttctttgtatcccccttaagaaaaaccatgccattgttaaaaaggaaaatatcttttcctttgactatagtcatagagcaaaaagcatattactatgctgttttttgaatgctatatagcactattgtagcctataaaacaatgatgataatatactttcctaagtgacttcctcatgtataactttactctccctctggtaataagaactgggcaattgattgtacctttttttcttctactttatttctcaggaaatgaagtaaagacaatgggcttcatggtgagaaactttgttattacggtcctgacatatcaccaggcagtattcaagggaagaagaatttaacatttgtgacagttcagtagctctatttctgatgaatgaacaacagctgtaaataggcctttggtaggtgttttcaaagtctttatgagttttggaggctatttacttaaaaagcacacaattttctaattgtaacaggttatagaaaactaatactttaccagaaaatctaaataggcctattgtgacatcactatatactaaatcacgtgactaatttaccagtaagagtaaataaagcactgaggaaaatttaaccccctgcacacattgtatacttctctatacattgcatttgtattttacctcctagaattcatacattttttagtaactggtacaatacattaattttaggacaccatcttgtaaataatgagcacaatttttctagttgcagaagagttgatggaatttcaacagatattaattaattatgaggaatttgcacatacatttaattcgagaatcactaacggctcttccacacctatatcccaccatgtttgcttagtagttttatgcttttaatcacagtggtcacttgaaaattcatcagcaagattacacaattttaattactttccatctttgagagccataaaaaggtagcataaaccctaagtacagtcttaactgggactctgtgaaccactgttgaatgaggtttattcccttctagacttagtcccatgaaagtctcaaaataaggatttgagtgggtttagtcagagtaatttataaatgataagaaagccttaggcctggcacagtggctcatgcctattattccagtgctttgggaggtagaggttggaggatcacttgaagccaggagtctgagatcagcccaggcaacatagtgagatcatgtctcttaaaaattattaaaaattagcagcacatggtggtgcatacctgcgattttagctactagtcaacggctgcctcaatattaggaggcaggaggatctcttgagcccaggagtttgaggcaggaagatctcttgagtgcaggagtttgaggttatagtgaattatgattgtgccactgcacttttactccagcctgggtaacagactgagaccctgtctcaaaaaagaaaaaaagaaaaaagaaaaagatttaggaagagaaacatccagaagaatccagagtaaatattacaacgcactatctggcacacttttgaaagttgatgaacacttgctgagtgaatcaatgaagaagtcagcaaatcactcaagttacatttataattctttatcaagcagctagagctctctcattaattaaaagcatcataattccactagaattaataaataaatattaacaaaagtcacatttttagtacctgaggaagcacatttattaggtgttaaagcaagtcttctctcacctggtggaagacacacaaacaaaacctgagggactgtgctggccaggagaatcttgaaacaactggtacaaaaagaaagagttttatttggaagagttttttaagaagtgatatatggcaagctatatttagcaagaaatctcaatcctaatattgattctgcttagccaaacttactggaaggtaaatgccaggtcctccagagagagcacaagctttagaaatcaccagaagcatagctcagagatctgaagttagctgacaataaggttagcggttggcatctgctatgcatctagtcaatggctggcgacaacagaagacataggtcaaagggaagccactatcagacatatagttcaagatctagtagatacaagagaagtgggtcagtggatggaagctgttaatcaggaatcttggtatgtggtgtgtgttggtggatgccctgaactacagacacaggaagtggcaggaacaaagtgagtttcttggcagagtctggacacaggacaatcagtagaagggccgcaatagatttgacagttgctgaacgcacatttggctggctggcagctggtgggtttgttactgttctcctggcagttgtccaggacccaggttggaaactactaagtaagcagagggcacctctttagctcactcttctagagcagagaaaaacaaatcaggaaaaaagaatgtagcaataactcctcaaagagcaggagctctcatttccaaagcagcagtagctgaaacacatgagttaacaaagtgagtttcagaagatgtatagaagctttttcaaatgtgctcatcaccttctaagcaaatttcttatatatcctcactgctttctggcagttccgtatactcactcacttctgtcttcctgagattctcttacctgatgtcattcccttaatagtttgttcggatgtccatgaaaatgccctccagctttcttgtataattttactcataattttaaatgtcgcagctattaaccttcattcttttcattttgtccaggaaatgttcagaatcataactagctgagatggaattccttctttagaatatggtgcaagaaagaggggaacataagtgctcttttccacaggtggtggatacaacatgccaaagaataggttagtggcttgcaaaacaaagatgacttctcattcttgaaggtttcacagttctttttgtcagcaaaaagagaaaaaatgtatacaatgtggtgggctttttataaactaaactcttcaaaataaaatattatcatttattctaagattctatccagattgtatctccatataaattcacccatttaaataacatactaggccgggtgtggtggctcacacctgtaatcccagcactttgggaggccaaggtgggcagatcacctgaggtcaggagtttgagaccagcctggccaacataatgaaaccccatccctaccaaaaacacaaaaattagctgggcatggtggcgggtgcctgtaattccagctactcgagaggccgaggcaggagaattgtttgaacctggaaggcagatgtttcagtgagcagaaattgcaccattgcattccagcctgggcgacaagagcgaatctttatctcaaaaacaaaaacaaacaaacaaaaactagcatgtaaaattcaaattaattggaaccctacctgaggtgaattggattccaaagtcctgagagattttgcaaatgtttttatagacccttgtgagaactagaaaatttactaagatttgtttggagggtgctcttacatctggtttattctgatttagtttattatttcattaaacaaaatctaacctattcaaataacaatatatttaaaagatttttgatacatgtgtccaaatccacacttggactacagtgatgagtatctggttccccacctcctcaacaccactaagtattgttagcatatttattttgactgtttgatgtgaaaaatagtgtttagttattgagctaataagtattcattagatgactggtgaggctttctattttggtatatttgtattgattatttagcttcctagttgtggatctttattgtcagttttaatatcactcagtaaatgtatctttcattttaaaaagagatatttttcttaaaaaaacagaagaaaatgaacattttcagaaagagtagttttgatggattctgtattgtcaaattaacctttgctttgaaaaatacggtgaatttttagaaaaaaaaaaagccgattcctggcctgtcacttagaggctcatatttagagagttggaattggacccaataacttgatttactttgaggatacatttacaaagcctggttagaaatccactggatgagaaaattccacagacatttgacaattatcaaagtctctgattagtatgtctatataaaattaaaacaaactcattgcattccaaaagatctaagatagaaacaattttccatcgaaccttcttggggaaagctcttatgcaactttcaccaaatattttattttgcagaactcccctgacagacttatatcaaattgctttgacatttgatagatagattagattatagagtgacacattggattaaaggtttagtagtgtgtggcttccatgtgccaaagcattaacatagtaatatttctaaattgcttgtttatagatgtagaagattcagtaaaatgagtgtccattttactgtccagtaaactgtggaccattcacagtccacagctaaaaatgaactgtggtcagcacttagaataatgcttagtatataacagcaactcaaaagtatttgttgattaaattatgccgaatgatgtgtttgaagatgtaattttaaataatggtattcagctgtgtttcagcaaacatagtatgagactaaccccgaggaaattttttttctttcaagatttctctctccctgtcttgctttttcttcttcatttttgccatctcttcacactactgggaaggaaatagaaagcattttgttctcctcacagtttcaccctaataataaatagagtaatgaagtataggtctcttcatgggaaacaaggcaacaagtatgctttaaaatacagcagtctctttaccctgtggttgagaaagttctgtaatcaattcataaatttgtgttacagatatttcttataggccatcatcacctccagagattcagctcatgctgacttaacaataccagatatttatcgaccaataagaatttcataaagaaaatggaaagtgctcttctgttttaatggagaatgaaggctcatccatacaactgtccctagagcaaacaggaacagacagcgtgttacgtgcgggccgcataacatttccttgtgtggtctttttttttccactgtattgttacatctgataattgtctatattgggagccagaggtagatagcacttgtatatggaattaaaaggaacagaaaaagtgaaaaggcagcaaaatattgtgtttttttgtgtgtatcctctgaatttgcctctgaagtcattggccttgactgcctaggtaaggctaaattactccttggaaggttctataaaaaatttcttattaagtacactacatttttttaggtcatggaaataaaatgattttgacatttgcaataatgctctgatttgagtttagaagaaaacatagcctgcaattgatttcactaactggagtgtgacctatattgcaaaccctatatccttcctttaatttttaaataattaattgctaagacatacaaatactaaaaaaatttgattgtttcttcagagaatagtaatgtcttttgtctttttctttggatgaaaaaataagataatagcagaggaaatacaaagctaaaacacctgtgatccagcacaactgtcagttagaaaagtacaagtcaatgtccatagtcagctgattaaagttaagcaggtgcatcaaaaatgatgacaggtacttgtgcataagaaagtacgagcttccataattgaacttgattgctcgatatcttcatgtgggcctatttcatagaatcattttaatgtgaatgtttctgttataaaagggatatgttatgttttgctaaataattgtatctacatgttgtaatagaactggtcaatatagatataattaagaaggccaaccataatttattcaatattgtattagttcacaggaataattttaaaaacttgacactttattgactgttctgcaatgaggcattaagtaataatatggtgtttattattaacttcatatttagataaacttaacatgggctttaaagaatttactgaagaggattaaatacatttttgaggggccacactcaattatttgattagattagattactacagaaagtagctttgtattcattttctaatactgaaaagttctggcatttagttgaaagatccgtatatcaaatgtccaatctgcagtccccttcctttggattcaagtaaagaacctgtatctgaatgacatggtcaatactatactgtctatacagaatggctgttcctcagttcacccttgttgggatatgaactttgaagatttccttttagtttatcctatagcctctcactagtagcactttttgtatatggcacatgatataggtgcctcgtgtgcagtaaattgcccgctcatgttgtcccggaggcctagatgtcacgtaaagggcattcacctacttgaaaaagttattgctttccatagtataaaattactggagtatgcataggacatgaaaactttcagtaatctgtgggatttttcctaattaatgctatctatcaagataattgttacacacctcagagtataaatagccacatattgtattttaaaagtagatctctagtttcattgccagatatctctcagcacaaactagattagtatgagaacaacctgcttttgttttaatgcacaaaccaaactttgaacatctgcattccaagtacaaaaaaagtccattgtaaatatgtcagcaagaattaatatcattaatgacatgcttatttgatcaagggaatacattaaaatataaagagtaatttcctatgaaaaaaaagtaataagaccagtaaaaaggaacagaaatgtccaaaaaatttgagagaagaaaagtgcttggaacttgaataaggtcacaaacatttaactactgtcattgtgatatatgtcagaaaagttatagaactaagaaagttttatgttatgtatttcctttaaagcttgcaatcaggtttactctgatatcttaatatctgttttggtaatttgttaaggtttaaaaggtgagtaaaatgtttacaaggtattggctgaggaactttgtgttggaagttaataaacatcagtgtcaaattggaaagattttgcatatttatattgcaaggaaaaagtcactaggctttcttacttgattaggaagggcacttccatatgtcatctctatgatttgaagtggactatacttctcccttctattggtttaagaattacacacactgtatattcttctaccacgtaataacttagaaggatttattgaaaagttcaaaatatgctgtttttgtttttattccattgatgaaataaatgcatgaatgggagtaacagaatatattaacacatctagagaaaaatattgttgcttatccctgcatagctgctggtacatcacagatagcaacaacaaaaatccataaccagtactatgatttggatgtcttctccataactcatgttgaaatttaactgccattgtgatgatcttggcaagtggaacctctaagtggtgattaagtggcagagtcttcataaatcctgttatttcatgagtggtttagactcctgggaatgagttccccaggataccctttctctgtctcacaggctcctttgttctctctcatcatgtgatatcttccaccatgttttcacacagcaaggggatccttatcagatgcaaaccctctatctggaatttccagactccatagctaagaactgataaaaatttctattgtctataatttgcccagtgtgtagtattctgttacagcaatagaaaatggactaggactaccagccaaaatcttaggtcagaaactaaagtgactccagtgagacattagatgaataactaattaacaactcctaaaaattataattgcaagctttaaaaaaataatcttatgaaagaataagtcttgttatgtaacatggaccacttggatcttactgtctcagcaagatgctataattcttagtaagcaaaaattaaatactcatctttaattagaagtctatcttgttgaacttactctacttttggaaaacaaccaatgattgctaaatacctttcagacataactatttgaggtgaccctgttggtggcaaagggtctaatgtattgaacatattggcaaactctctgatactgctctttcttcactcaataccatctagctgcactgggttccttttattctgcattctccccaagttcctgcctttgatcttgttctccatgtctaaaaccgttgactgcagggcactctccttttaatatttctagatatgattcaaatgaaatttttgttaaagccaaaatatcccaaccttgttaaaattaaccagctcccctctttttataatataatttgtatcccctttatactgttttatatactctaatattatcatatttctttatcaatatttatgatttattttttgtcattcccccagattgagttgtttattattgtatttccagaacatagaagagggcttggcatacgatagaaattccttattattgactgagcgcttatgtatgctgaaattacttcgaaggataaaaatgcgtttatcaaatgatacgatgaatcactgactgaattatcaatctgaaatgtttaagtagattctcccaaccgtttcagggaacataatccaaaaaaaaaaaaaaaaagcaaagaaaatgactggtttaatgatttaaatgataagtggaacaatgagtaagtaatcatgtcactgcatatgttttaaatatttcactccatgcttttcttgcatgcatggcttctgacaaggagtctattgtaattcttgtcccagtttctctatagataaggtatttttcccctggctttttcttttctaaagatttcacatcatttttgtttatctgaagtatgaatatgatatgcctaggtataataatctttttgttttattctaaaatgctgcttggtgttctctgagcttcctgagtatgtggtttggtgtttatcattaaaatttgaaagttctccatcattactgcctcaaaaccttatttcttctccttttgacattcaagttaagagtatattatatgttttgaattgttccatagttttggatgtcctcttctgtgtttttgtgtttgttgttgttgtttttctgtttttttaatctttgcatttcagtttggggcgtttctattggcttagcttcaagttcactgattctgcgcttcaccatgactagtctactaatgagaccattaaaataattattcgtttatgttgcagtaatttttatttctagtttaattcattctttaaatttctatctccctgcttccattgtccatctgtctttatatgttattatatctacttttcccattagaactctaaatgtattaatcagagttattttaagttgtgtctgatgattccaatgtctgtgtcatatttgagtctgatgtggatgcttgcttttactttggaggctgtgctttcattgccttttggtgtgtctcttaacttttttgttgaaagtcacttgtgctatattcagtagtaggaactgaggcaaattggcatttaatgttagatttgaaatgattctggctagaagttgggctgtgtttaatacctgctgtagttgtaggtgtcagaggcttcagatttctctattatccttaatttttgtctaccctcttggctttcagctgacctaagtactcctccttagagacgatctgtttcatggagccctttcaactataatccactgttattaaactggagccttgccggtgtggggcgaaagatggaggagaggcgaagcatttcataatcttataattaaacctcagtcttttattggacctgtgtccctgagctgtgagcttcactggtatttctttgtcctccctacttaggtgagccagaaaaggtagtgcaggcatcgtgtggaatgggaaaataccctttccttgagttgaataaggtcctggtaaagtcttttcttcctgaagagtaaggatttatgatggaggaggttctgagcatgcttttctaggattattcctctctttctcttgacagagccattttggcatcatccttggatttcttccatgagaaacctgtgggatccctagaggcaaaaaccatggagtatatgaggtatgaggcatccttaagactgtagcagctaggagggttggatacacatgctggtacacactcagcctccagaaattcctcaaatttatgatttaagtgttcctaccagatgatggcttcagcagcttttgctctaggaaagcatactccagatgtgactctagactcacctgcctccccagattttggagtggaatttggccctccagacttagctctttgatgggttcaggaaaagtcattgattttcaagttgcccattgttttcttgttgtaagacaatattggtgactcttaagctccttacgggttggaattgaaaccagaaatccatacattccttgagtcatcatccccaatggcatcactttcattaatttctggaaaaattctctaagcaaaaatatagtttcagtggagaatgaaattaatgtttatactggcaagtgactattcagagttaagtttagaaagaagactcagaatccaaattctaccctcaaaatatctgaataatctgttagactaactctgttttcatttttcttatgtatgactgatttaaagactctaataattattaaggtatatgtttacttttacctcaacccatttcaatcaagataaagaagaagatgattctgtgtgtctttcttatgtatttggtatgtggagtctcatgttgaaattaaggaaaagtagtgatgcttcacaattgcttttgatggagacttacgctttcttgattaaagttcagttgaaaagggcaatgtattatttgtccttatggtttgacaaaatgacgtcagcttttataaaatccagtttgaaaatgactacatccagaaggttaatcacaaggaacacaatggtacctgaatattaataaagaaatatttaaattttgtgaaaagaggagcctaaagacctaccctccacttaccttactcatgggaataaaacctatacaactagaagtcaaaacttatcagatagtacattgccctgtaatttgcttaaataaataaatcttcatattacacttgtaatgtagtttactgtggagaaacacagactttgagaaaacttaaaaataaatctcagacaagtaatttacaatctctatgactgtggctaaattatgaacaattagagctactgcgctggatattaaagaaattaaattaataaaatactaaatcagacatagatggcaatagacaagtatcaaaggtggactaaggtatagctattagcaggtcctgtctagtcacgggataattgatacagaactttccttaattcctagcgcttggacttgtaagctgtggggaaatgagaagcaaacatttgtttcccccagactcaggaaagatagcgtaaaacaaaactccaaaggaaaaaatgtgaatttctcatcaccatccaatcaaaatgcaatctactgtcattcaaatcaataaacatttacagagagcctagtcatggtactgccacaaaagcagcatttgaagggctcaaagtgtagaggagagtttataaatgcaaataatgaaaaataaaacatgttagtgaggtaacgctagacaattagtcaacagaacagaacagagtcaagaaatagacccatccatttaaagataatgtatttacgaaaaaaggggcacggaactgcagagtagtagaaaaaggagagagttttaggtgatggtgctgattcaacagaattttgacccctaactcacatcacacacaggcacacagacacacacacataaacacacaaacagcttttcattgatggcatatttaaatgtggaaaatcaaataagaaagtttctaaagttaatatttttattaatttggggtaaacaaagttttatttaaaaggatgagaaaattactaactataaacagaagatcaataaattagattcatttctgttaatctaaatacaccattaagggcataaaaagacaaggaatgatatggaagaagttaagctaaatatgtatactcaacaaagagttaatatctagaccatgtgaagaactatccaatcctgaagacagacaaacctactaaaaatagggacaaatgacatggatgttacttcaagcaaaaaatttaaatggccaagaaacaagaaacattttatttaaaaagtgctcaattcaatggaccatcaagaaaattaaaaacaaaacaaacattttttagaattacattctcactagaagtgctaaatgtaaataggctgacaacttcaagtgttggtgagggtgtagaacaactggaattctcatactctgatagtagaagtcaatattagcataactgcaaggataactttgtaatggtgtaaaatagagctgaacaagcacatcctacataacttaattccacccttacacatattgcagaatagaaatagatacagatgtgtattaaaatatagccgaagaatacaagaatattctgtacactaattctaatagatccaaactagaaacaacccaaaggctcatcaacaaaagaatgtataaatatattttggtgttttaaccttgaatattatgtacacaaaaaattaaaagactactggtacatataacaatatggaaaaatcacacataatatttagtacaagaagacagacaccaatgggtaaatactttataatttcattttacagttcaagaacatgcaaaaattagttatgtatgttatatgttaactaaaatctcatttaaaatgatgttaaaaataacagttcaacaagattaacagtagacatatggctgagataaaattcaggctgagccaatgtgtgattagggtaagaggcacagagagggccggggaaaggcttcaaaaaataggggatacagatgtcacaaaatcaaaatatccaggagagcaagcaaataaggcaaataatgaaccagaatgaaattaacaacagtggcatgatcatgatagtaagtggaactggcattctgcttcattgtcaggaagtctctagggcaagattgaactgagaaccagaagtgtgtgccctgtctaaagggaacagctgggagttactgcgagctgcctgccaatcactttcttgcacagtgatacagtttctagcttttctagctattccagttcctcaaaaaggtaaatattcaggcttttaaaactttatttccttttaattaatgaaatatatgcccccacacattttaggttgagtgagagaaaaaatgtatctttaattgttacatgtcccatagcttataacttctggcaaattctgtgatagttcaggactgttttgttcacctcagtatcttttgtgcctggcatatagtatgcaagcagtacctttgtttctgaataaatcaaaagattaattaatgaactcaagactgtgtttttgtaaaagcaagtatgagttttcaaaacagagctgaagaacataccgctctcgatgatgacctatgcaaaaggatggatgactgtaaaaagcatatgtttggggacccatgtgtaagtcaggatcgcaggagcttagttttattatttgcaatattgagcaaaagagcatgaagccagagaggtatgggggagaaagacagtgagggaactaggtgtcatgctaagaggtttgaatatttatcttatgggaatagattataggaagccatcaaaggcgtaagcagaaacttggttaggtttgcaattagaaagaacattctggtggaagtgtgttcatggggtagagagataagagacatcactcctaatttttccttttcaaaacagctttcccaaggactttttgggtctctcaagtacatagggtcagaagtctaaaaagcagcttaaggaataaaccatcaaacaatccctctactgtcaggtaagaatatatggttgagtatcacttgtccagctcagtcatcttgcaagcaattgacgttggttatttctgtgttgaaattaagtcatgaaacacaaagcgctgaaccagattcttaatttggacttaatcgcatttattatagtgcaaaacaaatacattcttcccagaccagagcaacattgaatagcattgtaaactaatttttttgatgtcaaggaaagatgaaaacaagataaaacatgcgagagaagcagcttgcattagatcaggcacagtaaaactaagaaacatcagttgctactagcaaagaagcaaaagtccatggagtttgaatttttgttgtggatgctcagagtgattattcactggaacaaagaagctgctggtttcacagtccagagcaagatggacgacacgtgctgaacacatgggtcagaggttggcaaccactgaacagaggccccagaggtctgaggctgctggacacaacgtgaagactttgaggacgataggccaagcaactcgagggttggcatccagaagtgaggaggttttggggctggcaactcttggacaagcagaattgggggcgataggcattgggcacacagtctcctatgggctggtaactattgagcagcggcctcagtggacgacagccgctggacacatacctctgtggtctacaggatactggaaggcaggaactggagaagaaagaagcaggaagaaaactgcttccttggcaaggcctgggcacgtagtaagcagtggaagaaccgcaagaggtttcaagattgccggtctcacagtggaccggctggcagctggttggttcaccgcaggtctcttggcagttgtctgtgacccaggtatggtcttgagagctagtgggtaagtagaggacatctccacagctcacgctggtagggcagaggtcgatggaggtgagaggaatatggcgggaggttctgagagatcctgagttggagtttcccgagcagtagttggggcaagacatagtgaggttgtgagagcaggctgaagttgaggcaaagaagtgagtgtctgaagtttgttctgcccttccttagcttgaccctttatttatccctagaaggtggtgcttctgcgtgcagactcttcctcttgttgtatgaagatgcatcagaactctttattatagccaaggaagtgaggcttccaccctccataaaactggatgctccttgcaatgccatccattgattacgtctatctataaaccaatgcgactgagttttaataggatctatccttcttaaattatccaaacaaaacagacacattttaaagcctatgtgcttattccaattataaccaccattgcacaaacattcttaagattcctctcttagaattgtctttgaaagttgtagcaacttctttgaaacagtgagaacttacatctttttgaagaaaaattctattcttcttggaaattgccagaagtgagtaacttggaacaagtataagagaaaatgaaaatccttgcaaactatatgacagaaatatggacaatttcaatatgttttgcttggttagaatttatttttctaagttgtgatttgctttatttcagaattctattcagacttgactttctaccaaaatatctttattcaaaaatatgtgctcattttagtcatttcaataaataaataagctgagtgaagctgaaaccttggcttatgtttaagatattcttgaatatagataatgaagttgggccaagttaaaattatgtatcctactgtgaacaaaagcagagaagtagacctcttaaagaaagtcaggcatcttgacatttttcatgattatttcaaggttatgtattgcatggtttctcatattccaactgaaaaaatattgttcttggttaaaaaatacactgattatgacatgaatttattttgctttctacattggccttgatgtcaatttccaaaaaggagcttctaaactgctttacatagggaaaagcatcaggataaattattgttttcctaagttttagtactttaaaggtcatttgagaatatgtatttctggtaaaattgttttaaaaaatgtatgattttagttagtttcaactatccctctatatttttctcatactgacatacccagtggctccagtagctattttaatgggattttaaattatctgctggctctaagttccaattccttttggctagtcaatttaaatcataacactttcttctattttggtgtttgagggacatacttgtgcttatccagtctccctctgtcctggaggagtgaaatctctgaaacagaaagttggtttctcaatgagacaacactagactattttactactgggggagaaatataaaaataaaatggtataatcccggaggtcctgtactaacatgttgaatttatctcagtattttaggtcagacgatttgtacctgatgtatttgagaaagccccactcactccaacccccaaccccaggccctcatcacctaatactgtttgtataaccggatactttgtatacttcggacatcacctaatactctgtgtatacagctgctagagtcttcttgtaaaatcctggttgcatcagctgaatggcgttagtaataggtacagtcatatttagctgaatgcttatgaaattgtatgttgatcctttttatgtctgctcttctctaatataaacaagagcccaacatctgtatcattagtacatcaatacgcttgtgtgtatgtgtggatagatgtatatactacatgttctatgtatacatggatggttttccatgaagagaaggggtgtggaataagaggaaactggcattcatggaatgcctactctgaagaaccttgtgctgtgggtgcccacatgtgccattcactttgtcctcacaattctatacagtagatcttactatttcaagtactcatacgagaaaacttgagctttagaaagttgcagtaataggtattacgaaaaacatctgaaaaaaggctccttgactccccaaacagtttttctctatccaatatggcattacatagagatgcattgatactatcatttaataaccaataaccgtgtgaattgggtaatttgcataattgctctgctccccagtcactatcagtataattttatggaaatattaatagtatctacttttcagtgacatttcaggaatatattgagatgtcattaaaagttaaaataaactgtaaaacgttatacaagagtaatctattttcttgctttggcgttcttaacccattctggagagtacgaccttgggtttaatttctttagagcaccaccatgagtttctcgtgtgtgtgtgggggggggggggcggtgggggggtaaaattgcaaaaatatcaacagatcttcagaaagtgaagtaccctgaatataagttgtccttcatgtaatataggttgaactaaaattatttcatagtggctgtgtcactaatagagaattgcttatttgggcataataccaggtacctcattagcaggatcctataaactacatgtttcagacttctcttctgagttaagagcccagggataatcggaggaactgggcatcctgtgtgatttcccagatttacccatggcgttgctttttttttttttttttttttttttttaataaaccatggatctttgtctctcctactgtagaaggagaattctgagtttctctgtcttggagacaaaaaatccccagaacatttcaacaataaagttgtgccaataaacaaggtacttttaactcatccattcagcaaatattattgagcatgtagtatgtgcaaaacattatgatagatgctggcaatggaaccaacataaaattggtttctgctctcagatgtacactatctggtaagcgtgataagacaggtacataacccatgtcagtgtttactaagttccgtaagtaatgtacagagaagagcaaacatagttcattcaccttaccaaaaatttaacatttgatattaattttgaaagatggaaggggctttggagaagaggaaaacactttaggctatggaagaagatgtcaaggtagagaaaatgacaacatagagcttcccagtgaaggattctaagaagcaaactcatattcacatgttgaaattactgggggaagtagttaagatattgttctaaaggtgtggtgatccagtaatgtgtttcaagaagagagtgctgaggttaatttgcagcatagattggaaagtgggaaaacctgttatgcttttctccctttatcttctaaaattatatatttctttccatttttttctttctgttatcatggcaatgatttaagttgggcttttttgttctccttcagtgaatttcctactgccacctttgacttctgtccctatggtcttctattttgcctaaataatgcatttgaaataatactcatgaaattaatttcatcatatgattctctttctcaaaaaagtggatgatttctctttgtcaacagagaattgttctgacacttgtctggcccttctctacttcccagtaaagattctctcctacttttttgggttgcctgttaatatttactagttctaatagttttttggtggagtctttagggtttctaatgtatagaatcgtgtcacatgcaaacagagacaattttacttcgttatgatttgggtgattttctttttttttttttttctgactaattgctctggctaggacttctagtactatattgaatagaagtagaaagagtgggcatccttgtcttgttcctgatctagggagaaaagcttttaggttttcaccattgtgtgtttcacctgtgagtctgtcatatatggactttgttatgttgaagtatattccttctgtgcctaatttgttaaagtctttatcgtgaaagtttgttgaattctgtcaaatgctttttctacatccatagggatgataacttttatccttctttctgctaatttggtgtatcacattcattgatatgcatgtgttgaatcatcctagcctcccaggaataaaattcacttaatcatgttgtatcatcctttgaatgtgccattgaatcctgcttactagtattttgttgaggacttttgcatctatcttaatcaggcatattggcttccagtttatgttttcatttctgttttatcttttattatccttgaccaacactagtatcagggtaatgctggttttgtaaaataaatttggaaatgtttaaaaaacaacaagccttacttctacaaatcttcctaattttataaaaaattttctatttgacttttttctgctctatttttttttcttctgctgactttgggcttagtttgttattctttctctaacttcttgagaagttaagttgtttgaaatctttcttttttcaggtaggtattttttgctgtaaacatcttaaaatggttttcgatgcattccaaagttttggaatgttgtgcttccattttcattgtctcaatattttttaatttctcttttgattttttctttgatttattggttgttcagtagtgtgttgtttaattttcacatatttgtgaatttttcaattttcctcttgttactgatttctagtttggtggtttaatatcattatggttggatgtttaatatgattttaatttccctaagacttttttgggggctaacccataatctatcctggataatatttagtgtgtgctagaaaagaatgtgtattcttctcctgttggatgaaatgttttgtataaatctgttaggtaagtctgctgtttcctttttgatcttctgtctgggtgatgtatccactgttgaaaccggggtatcaaagtctcctgtgattatcatactactgtcaatttctcccctcagttctgttaatatttgtttttatatttaggtattccaatgttgggtgcatatgtatttgtgattgttatatcctctttatgaatggactcctttttcatgatataatgaccttctttgtccttatgatagtttttggtgtaaagactattttgcacagtagaagatctagccaccactgctctcatttggttaccattttcatggaataactttcactttcagcctatgtgagttctaaactctcaattgagtctcttgtagacagcattttagttggatcttttaaaaaaatatattcagccaccctgtattttttaagtggatatttaaatccatttacatttaaagtaattcttgattactttactgctgccaagaacttactactgccattttaattgttttctgtctgttttgtgattccttgttctttttgatttgacgattttttcttagtggtatgctttgattcttttaattttaatgtgtttacaacagcttattcttggtgatcaccataaggcttacataaaacatcttctaactgtttattttaagctgacaataatttcactttgatcacatacagaagttctacacttcttccccacacacacatattttgttattgatgtcataattacatctttttatattatgtatctattaacaaattattttagctgtattagggttcttcagaggatcaaaactaatagaatatatataaatatatgaggatatttattatgaaaattgactcacatgattatgaaagccgaaaagctccatccatgccatctgcaagatggagaaccagaaaagtcactggtgtaatttaatatgagtccaagggcctgagaaccatggagggttggggaagggagtgttggtgtaaatcctggagtccaaaggcccaaaaaccaagagctccagtattgaagagcaggagaagatggctctcccagctccagaagagagaggaaatttacctttcctgcaccattttcttccctcctgggctccattggattggatgaggtctgacagattgataagggcagatcttccttatttagtctactaattcaaatgctaatctcttttagaaacaccttcacagacacatctagaaatatgctttgcccactattttggtaaatccttaaccagccaaattgacacctgtaattaactatcacagtagttatagttgtttttaatacttttgtcttttaacttttacactaaagttaaaagtgatttatataccactattacaatattaaagtattctgaatttgagtagatacttacctttaacagtgagttttatactttctcaagttttcatgtttcttattagtgccttttcatttcaagttgaagacctccctttagcataccttataaggcagatctagtgttgaggaaattcttaggcttttgtatatctcagaaagtctttatttctttttcatttctgagagccagcttcactggggatattattcttagttggcaagtgtttgtttgtctgtttcagcactttgaatacatcattccactctactggcctgaaagggttttgctgagaaatttcctgatagtctcttgaaacttccctagtttgtgacaagtcatttttcttcataatgggggagtacatactcatgattaacaaacatgtctctcaagtctcatgtagccaaaaggtacaaactttgtgtctgcagcaggaaaacaacatggctgcaactgctggtccagttactccatggcttaattaaactgtgtcaataatgattatattactgcttaatatagaacattcggtggactaaaaaattacatgtttgtttgtttgagcccctagcagatgtcttgctgccaaaaactataagtaaaagcatcttgttttctggtgctaagctgctatctgtctctccacacctgctaatctgttcctccttctctatcctgacataagtcactttaaggagaaagacaattcagggtaggaacaatgtctatatctttccccaagagagactgaagctgtatacactcattcagatacattgaggaacttcaagaaaaagaggaactcaaacttttgtcgctctcttggatacaggtgtccaagttaccattttactcagtccagtggaggtgaaagggaaatacttgaatacagctaatgaggctttggaagagattacagatggaaaggaaaaataatgtgactttctaggtggagccctttgtgtcagtttaatgtacaattgacccttggcatctttgggggactggttccagaatccctgcagataccaaaatttatggatactcaagtacttgttataaaatgatatagtatttgcatttaattcacacacatgctgtcatctactttaaatcatttctagattactaataatagctgatacaatgcaagtgctatgtaaatagttattatgtgttttctagggacgaattataaggaaaaatgtctgtatatgttcaacacatatgcaatcatctttgtttcccttaatgttttcagtctgtgattagttgaatccacagatggtgaacccacagatacagagggcaaactatacttttgctgttgtgttatatgactatgttaccccgttccataaattacaaaagggattccactgattgtgaagatctgtattcatagaagtgctagtacttttggggtctctgtgagttacaagtcactgtgactgatgattttgttattggagcacttagcataggtagacgcctccattcactgaatgccacttggagtcttgttaatagtattctaacctgaatgatatatgagatatattaaatagatttggttgcagcctctattggtcagactaatcggagtggtcagtggaatgtcattctcatgggaaaattcaccaggagcagtgcagtgtagagataagagttgggtattgtttcagggaaaataatccccatgggtctcttgcatttctgcatgtcttcagtgcagtcactggctccctttgttctaaattaacttttcaagcatgtttttagagaaacagtcttggaaaatagatacagtgtttctctcagggtcaaatgtcaaacatgcttactcttcatgatgtctatgatccagggttcctaaactcaacattcctctcctgtgaaacaacctgctgcatatgcaggtgtcagctggccctatgggaattggagctcagggatctggtgtcaatgctaacactctggcttcggctattgccataaatgataaaggcctttgtctctaacctaggcttcttatgtcttctgcctgcattcccgaaactatgacgggttaacttgttagcatacaaataggataaaatttctgacttttcacagttctcaatgccccttccacaggtttcggttttctagttgaaattgtggcactgcaacgtcatcataatcaccaactctattgctttgacaatcttttaataagacacagacattttagtcaaagtataatatagtcataataatattgaaataattatgggcaatttatgcagtaataactagtagagattaatcgaagctattagaagataaagaaagcaacttgataccatattgaaaatacatcttaaaggcttataaggcattaaaagaaaaagctgacaaagaaaagggacacatgtgaaccacagtttagttaataaacagtctgctcatggaataggagagcaataaataggtctgtcacatattttttacagcaatccagccatataacatagccctccatgagactgcccattttccccaactatgctagatagaaatgtttggatagtttacttgggaattgacaattatgagggagtactcaaaatacccccgtgagctatataagcaacagcttttgcccctgacttccatattgtatataatatatataggtatacaatatgtatacaatatgtatagatatggcaatatgtatacaatatgatgcatttgtatacaataagcataagtatacaatatgtatacatacacagtatgcaagtcaggggcaaaagctgtttattatatagctcatcatttgttaacaagtgaaggtgctgcacgacggggcagcagctgctaaatcccaatcatgaatgagatgcaagagccagcccaggggttaatagctctaagaccagtgaatcctgggacagccactgctgtccatgtagtccaaaacattgatcacagattgcttggtggaaggaagtaaagacttaggacgaaaaagattgtatggcaggttctggacacatcacaagcagaggagtacagggagtggtttcacaagatctgggtccgcggcatgctgttggcagctggggatcccctcaggtttcttggcagtagttcaggagctggattctgccatagctgttcctggcttagcagaggacatctctgagggtcacatgaaaaaaggggctattagaggggatgacagccccatggcaataacccctgagggaatgacagctgtggttttcacctgagcaattattgaaagacaagatgaccttagtttagattataggtaaagtactcgcacttacttaatgctatttctccttctttgctgtggcttctagaattttttagtaatgactactagcattcagtgtaggttttattctgactcactatttcaaatgtggttatgaacatagctcaattattcagatgtcaggaaaatggctacttattactatgaaaaaagtactcagtgaatctctaaagcaagagaactgtggtcttgtttactttttaacaaaccatgcatctagaaaaacaatatttcaagttttattaaaatatatttaaaattctgtggctagatgaatatttattacacctggaatattaatttaaaataggttacatttatgacctaataaagacttgtatatgtgttaagtgtggcctttaaggtacataaagggctcactaaaattattgtgcttcatatgtttaaatattcttaataaacttctcatgagagatacttcaatgtacaatcagtaggacactaggttgagcatcacaaggcttgagttctagccctgatcggctggtaatgagccacgtgaaattgaataactcatttaacctcagcagatgtatttgctcaactgcagaataagtaaggttcactaaagatctcttacacatttagacatgattgtgattctatgaaaacataactgtgatagaaatgaggcagcttcagaagaaaccatgcaaaaatggtcactggtctttgccataaatacaaaggccacagcatttcactcagatatctgatggaagcttgggaaacatttaactctgattaggcatctttcagagcaaaacacagcttgggctgatatttgtcctctaaggaaaactcaaaggctcaaagtgtagaatattgttttttttaattgcctaacatttcatttgtagccttagggccatggagcactgaccttgcattagaagcccctccaggaccttctcaagatcaatggtttgatctccaccatcattcactgctggaaattaaaccagactcctgaggaccaagccaccatcagctgtagcctcagggagatgggaatgtgggagcaggcccactttaagcaagctgctgaataaatatagacttgaaaaatggaagaaacacatgaagcctgtttctgttttctaagaaagatgtgtttctttcagtggtaatgtatattctaactttaatctggtaagtacacctgtaatcactacaaaccttgtgaatatcaacagctaaaatttaaaatttatttattgtacttgctcctgcagtttaatttaataaaatatgaggtctagaggaaggtactttgttcctaagaatctcaacatgcattattagattggtttcctaacatatagagtgtgaaagtgaattcgctcatgccaagtgggagataagaacaatggctaataactctactctaaattttgacacagtttattgtgaaagagggctttttaatccaggtgtttcactctgcacagtcaatttaaataaggagcatgcaactgtccataaagtaatagtgacaaggcactgcaataataagggtgatgctattcttagctttctctttgatttttagccttcttttctcattatctttgtcaattagtagttactaaactccttcagggccaacgacccagtaccattgagtaatggaagaatagaaattggcttaactattttctgaaatttaccctcaacatttctatgttcttaagtttggatacaactacattagttttgcctctgagatccaagggacaactctctttgaatgccatcagtgactttgtttccgtaaagctagaggaagttatacaaaaagtcaggcaaataacttattcttatgcaactacaaaaagatttgtattttattttaaaattgagctttagatgtttagtgtatttgtacctatctacctatgatgcattttatacttcatcaaggccgtatctctgatataaccagaatatgatttattaattatattagctgtttccttcttaaatatttttcaatcaactattatttgagtccaagtggaagattttagaacaactctctaggtaaaagaatttcaaatgaggaagtaagtaagactcctggaaataaaacagaaagcacaactagggaaggatattgtggcttcaatagagatatgagtgattctcatctaacatggagcaaagtcctgtccaatcctattagtgtctacaatgagctcaaaattttcaagagaaatagtatttaatttaaaaagaataaggactaaaggatatggaaaatgaaagtactaccattaagacgataattgttgtattgtaggtgaatctgactccatgccatctaaatccttttcctagcatctagattctattgatgacacatgacttgaagttagtatttgtttttttctaagatatttcaattgcataatattttacaaactctaatgaaaatatgttcatttcctttattgcatttatttttgagttacaaatgagccatccagtcaacaatactcagttctctgggtgtttcttctgcagtctcacagcaatacaatataaccagaccaatcatttttagtcaaattatttgtatcggtcctccacattgcacagatatttcttccacatttgaagctactctaatgactagaagtataatataagtaaagcacaattaaagtattacagtgttatactcaaactttaaagattcatgggttaaaaccctcgttccaccatttacttcctgtactggaaaagttacttaaattacagagtagggagtaagtaagactcttgaaagtagaaagacagagtagaactagggaaggatatcgtggcttaaagaaagatatgagtaattctcttctaacacaaagcaaagtcttgtcctccacaggacaaatttgtgcctttgtcctcactggaaaaagggggatttactaatgttacttataccactgggttatttgagtttaaaatgataaaatatgtacaaagtgttaggtaaataataagcacccaattaataagagctattttatggctcttgacccagcactgtacaggcaagaagacattcttgatagtcattatgctttacttctaagagaaaaacatgtggttaaactaccaatgtcttgaggtgttcaggataccaatgtacaaatcctaccattctttttaggcaggaagaagtcccttggtctatgaagaatgctctgtagcatgcatatacccaccggtatgttttgacattgcttaaaaatgagtcctgcatagaatatcctggttatgtcccatactgcttacattcttttcacatggaatgaaataattttcttggtctctgccctggattcaaatgcattatagacaatcataaaaacaaactgaaattgaggcccaagagaaaaatatcagacgaagtatcaaatgatacctagcatatattgtgctcttattatgtgccaaacagtccactaagcatttaattggaatcatgccatttagttgtcataatcatccaatgactttaatattattatctccattttacaataatggaaccaagtctcagaaatgttaatttgggccaggtgcagtggctcacgcctgtaatcccagcatttttgaaggctgaggcaggtggatcacttgatgtcaggagtttgagaccagcctgcccagcatgatgaaaccccatctctacaagaagtacaaatattagccaggtgttgtggcatgcacctgtaattccagctacttgggaggctgaggcatgagaatcgcttgaacccgggagacagagtttgcagggagctaacattgcactactgccctccagcctgggcagcaaagtgagacactgacaaaaaaaaaaaaaaaaaagaaaaagaaaaaaagaatgttaattcatcccagagcacatagcttttaatacacagaatttggaattgagtaagatctagtcatactataagattcatgtccttttccttacactaaattttctaccaaggtttatataattatggcattccatattccaatatcaaaagtctttttgtacctgagtccacataatttctttctatgaggagctctaatatgctccatgttgagttagattaaatactggctccttcttcagctagcttctctttctagcagtggtcaagctcagcctggaaagctaatgtctagaatgatgaacagagtagatgggaaagtgaaacttaacatcacgtccctctttcctggcattcccctgctccacaacacataccacacatagcccgttttcgccaaagtcctgttttctcagcaagctacacccagtaaaataatatatacttggaaggcacatggaatgggtaggttttccctcttgtctttagaaacagtggtccaaatgaattgagctttttctgggcaacccagttggcattgcaatagtaaaaatccttattgtgaatgaacttgatctatgttcacatgattggctgtgactagaatgctgagaagctgccacgagataaattctgtctttactgttgccaatgctgtgttactgccatcagtgctgtggacagaagctttatgtcaatgttgtttgcttcagggatgttctgctattgaggctgccaaaggctctgagtactattgatggtattgaatagtgtttggcctctctcagacttccgtcaatcctatccctctacagagcacctgtgtatgtggtggtttacagattttaggcttaagtcttcctctttgagatggcctgtgtctatcccactgtattattcagggctacatagagaaacagaaccaataaaatagatagatagatgatagatgatagatgatagatagatagatagatagatagatagatagatagatagacagactatatataatatatatttatctcactgtatatatgtgtgtgtatatatatgcatgtgtgtgtgtgtgtgtgtgtgtgtgtgtgtgtgtgtgtatgaagagagagagagagtgagtgatttatcacgaaggattggctcacacaattatggaggctaagaaatctcatgatgtgtcacctgcaacctggaaactcaaggaaaccagtgatataattccagtccaaatgtgaagatctgagaaccaggggagccaatggtataaatccagtccaagggcaggagaaacccaatgtctctgctcaagtaggcttgcaggaaacataaacgggcacatttctccttccccgaccatttgttttatttaggccctcaatggactgaacgattcccatccacattggagagggccatctactgagcacactgatttaaatgcttatctcccttgaacactctcacagacacactcagaaataatgcttaatctgggcagcccttggctcaatcatgttgatacatagaattaccatggcacccaccctcagaactaactggtaaattatcagtagcattaggtttgccatagattcagagatacttgccaatttacttcaactagacagcgtttaagtttcttaattttctcccttagtagatgatgctgcctgcatcttccaaaatacaaaacagctaatctctcttttgttggatgactagctttcctaatctctcatggatttctgggtttatttacaaatccccactacctcccccataccaagtctctgagctagctgagttgctaaatatgctatatacatggtaattttttaagccttacactttcaatttattaacttattaaggctcacagtagccctattattatccttcacttttgaagttgaagaaactgaggtggttaaataacttgcacacagtcacacagttggaacttaaacagccatcactaagcaaagctaagattccagctcaaggaaatccatattcagagttcatgctctcaaccactaccttattttgccctgaaaaaatgtgagatccaaggccaggcatggtggctcacgcctgtaatcccagcactttgggaggccgaggcaggcggatcacgaggtcaggagattgagaccatcctggctaatgtggtgaaacccgtttctactacaaatacaaaaaattagccgggcatggtggcaggcacctgtagtcccagctactcgggagtctgaggcaggagaatggcgtgaacccaggaagcagagcttgcagtgagccgagattgcgccactgcactccagcctgggtgacatagcgagactccatctcaaaaaaaaaaaaaaaaattgaaagatcaatttaagaacacaccaaaagtttcagaatagctaagctacctaaataaaattaatcaatttcaaacatctgactctatggtcttatgatgttcatatgagtatattttccatcttctgttgactaccaccatgagttattcttttctggttcacactataaaaattataacaagaggatatgttctcttttcttctaaatatttatactattttcattaggtaacaaacgaagaaacaaaaagcctgtaacataacacctgcaaaaggattgaataaaaataatagtgtgacaagtccaaattttgcttccaaagaaagcaaatttatttaatacaaagaatattttccaaactcaaaaaatacttaagaaataatgaaaacaggaaaaaaacaaacaaccaaaaaaacaacgggaacgaaatgaagtgaagattctaaacttcaattcattctatttaaaggcttctggttgctacgtggttataaagcccatggaggtgaaattcaaaattaccttgctctattcgaacaatagacttaatcttctagttaatttgagaatgttgtgattcaatggctaaaataacagatggccagtgagtaggcctggattttagttgtggttctgatgttattaactacttgggcaacctctgatagagttgaacctatcgtaattcacaggactaggtaggcttttaggtttggttccaatattttatgaatttctgagactagtagcacattacttaataaaccagatccaatgctaagtatttccaaagaaaacaacttgcagttaaagtgtgatgtttcctttaagtattcatgttatttcctggctacagctcttattgcttaataacaaatcgtatcctactgctctaaaatagctagcatgctttccaaccccagattaccactagacatacccaaaagaaaaacaagaaaaaaaatcttgtctttggagacagtagtaaaataagacatgttcatttactaacaaacacacacaacattttttatttaaagaaatacaaaatatctaagtatctcaaaaataaattcatccaaatgagaatataagccatctcccctacagatcttcacttactaggcaattgagaaccaccagtaacacagcaagttggttcaactcctggagaagattccaggagttgtggctcaggtgcaacattgaccagaggtctacaggaactggattcagggttctgagactgacactgacattggctagatgcacgttccagagtttcgaaatttttagacttagaagtcttgggtgggcaactgtttcccttgaggcttgcaggttggcagctctgggctacaaaacccatctgctgagtgctttctgattggcaaggctgagaaacacaagccagccctgctgaagaactttctgattggcacgctgtcctttcgcagggcctggaattggagtaagtagtttggacaactccggggaagcagttactttgcacacagctatcgtctgtgaataagtcctgttcacaattggtcatttggcagctggtggtttcattgcaggtttcttgaaagttgtccaggaaacaggttctgctatggaagctgctgggcaaacacaatctgtcttcaaaggttataggattagtgccatgtgtgatggcagagagtggtggggcattgtggaagctcctgagtgaatggcagtggctatgaggcatattgctaaaaatccttaaagatggtcataaggactcaacatgctgagtttgaaaattaaattctttggtgcggcgattatatactcagaaacctgggtgttggcttctcaagacttctttgcaactcattgcttaaactaatttgaaggataacatctcattaccactttggttatatatgcagatgatgtcttattaacaaagatgtaagtccattttgaatcttcaaaatggcttttatgttagctccaaagatgactcattcaaggtggggttggtcaaataagagtctaaacctgtccaaccaagctaacatttttttttttttttgccaccatgactctgcacattggtaagtggacaatgagaaatgcatgaggcagtggccaactgaatactgattaacatttagcactggttttgagagctgccaatgtagcagaatgtggtaatttgatgttcaagacatttaaagttagaattggatccaggttgagcccaatctcattccactcagatattgttctctccagtggaccagaatgtgagaggactttgtgatcacattccttctcagtgttcatgcaaagtactgagtgtggccattgcccaataaatacttgtcttttgcctaacatttcgtttccctaatctccttgaaagccaagtttaaatgcgtccttttcctgaagtcttccccaatcttcccatttaggagttatttcttccttttctgaattactaatggatttaattccttttttctatacttgacaaagtggtgtgtttacttgtgtttgtgcttctcaaaggttgattattttcctttataatgaaccttcttcagatatttttcatctttattctgtgctttttttattgactgcagacagatgatcagttcctatgtttatcgcattaggacaccgttcttagcatagtttcatactcatggcacagagccaaccagcacaatttctataacatattctataatatatttggctcagctaatgacaataaaatagaagtatagtcttagtgcactaactagactccctttctaaggtctgaagaagcccaagaacattcagcaattctcagtaattcttatgcaaacacttccttgaaagactgaggatattataaatttaaaagggcacatctgaatactttcagctttataggctgcacactcatcttgtatacaatacctttgtaacacacgcaagtcatttataattttgaataaccacacttgtatgtttaaagatctcagtgtgccctccacatgaaccctacagccacccatttaattcttacgcatatatgtatttattattgcacggaggcttcgttattgcacagaggcttcattatagcttgtgactttcttgcttaaagataccaaatggcttctcattgtccttacaataagatctttttcctttagacttccctacaacatcttataagacctggccatggcctttctttctttctttctttctttttctttttcttttctttttttttttttttttttttttgacagaatttcactcttgtcgcccaggctggagtgcaatggcatggtctcaggtcactgcaacctccgcctcccgagttcaagcaattctcctgcctcagcctcctgattagctgggattacatgcgcccaccaccacgtccagctaatttttgtatttttaatagagatgggggtttcatcatgttggccaggctggtctcgaactcctgacttcaggtgatcttcctgtcttggcctcccaaagtgctgggattagaggcgtgagcaaccatgcccggccctatttttctaaatctaactcttgtcatgtcactctgcccaacatgattcatcctcacaggcctcatgcagctccttggcacactaaacctctccttgcctccaaactttgcatacgcagctgcctgtctgtttcacccctccactgccttctcccattctatccatagttctcatcttttgtgtcttagcttaagagttacttcttagaatgtctctctatcatcctatatgagaaaattccattatcagggtctcatattttttcatttttaaaactcatcttaacttatgatgattttatttatttctcttttgtgcttttgccactaattgtgaattccatgaagaggagaagcatgtgtatcttcctcacttccataaccccaacactgagcatggtgtctcattgccatatcatcagattcccataaatgtatcttcaaaaattcatacatagaaggtgctaagtaaaaatttaattataactaaacatctgaagaaatatagttttgaaattttgacatttccaagatttctaagaattggcaagagtattgagctcaaagaaaaacaaatttaaaaactatgcctatctttcagctacccctttgtttaataagaacaaaatcattaagaaagctacttattaccatggcacaaacttattcaattatttcaaaatcatgtttatttgtaggttttttttttctttttttttttagacggagtcttgctttgtcactcaggctggagtacagtggtgtgatcttggctcactgcaacctctgtctcctaggttcaagccattctcctgcctcagcctcccaagtagctaggattacaggtgtgtaccaccacacctggctaatttttgtatttttagtagagacgggatttcaccatgttggccaggctcatctcgaactcctgacctcaggtgatcccccccgccatggactccaaaagtgctgggattacaggcgtgagccactgtgcctggccatgtaggtatgtttttaccatgaaaatgggagccagttctcaataccaacacagagtcctcttgccaaattgtataggtataggcaggacatcatataggctggaatttacagaactgtctccagccagcagccttcttattaatttcacaatgtgcagccaattactgagtacttgggcagtcccttcaaatttcatatggtgatgttaagtctgtcatttgtgaataaggtcactccatgagttattttctctttggaatgaggcatttgcacattttatttaagtgagagccaaattaataagtgtttcagtatataattttgattcagtgagtaaacacagattttggttgttgctggatttatagaggaagttacctggtttattactatggaatgacgtaggctaggacaactggtcaccttggaattgtttacatgcagcctactaaaaactaagtattagctttgtaagcatttgaaaaattatgactatgtagtttatctgctggtattcttgagaaatagatagaactggttacctaattgcatacagtaactggatactcttgctactaaaggggtgaacaattccctggtctctcctggacttgaaatcattctcctggaatgactgcagctgcagtggcacctcctaaccaccagagggtggaatatcaacatttggtatgaggatgcaattaaatataagaattctagagtgagaatgccaggattctaagccaatatttacaatctcaaactgtaactttgaacaggttccataagttttctatgtcatggctgtttcattaaaataaatgagatattgtatatggtaccagattgcctgccacatattgaatgataaataataacaattattactgatcaggttaggaatcttcatgcagactaagacgcttctcattataacatcaatctaggattgatataaaattataagcaaaaacaagcacagtttttttatgtttatgattatgttgttgatttataattatgtgttaattttcacattccattcctttaaaggttggattatacttattcccattaatgatggaacttgtctccatctctcaagagctcagcatttggtagttgtaacattgaataatttatatgtcttttatatttgatcatatggctatactaaacttcttaatcacttgtttagaaacattgaagtgaaatgaaataaaataaccatttttttttttttttagaggcagggtcttactctgtagcccaggttggagtgcagtggcgtgatcacaatttgcaacctcaaactcctggattcaagcaatcctcctaccttggttttctgaatagctaggactacaggctcacaccacaacacttgactattttaaattattttgtagagacaggggtttcactgtgctgcccaggctggttttgaacccctggcctcaagtgatcctcctgcctcgccctctcaaattgctgggattacaggcatgagccaccatgcttgggcctagtcactctcttcatcccagtggtcccacaatttatttacctcatccttgtcttagttttatctcatcaaccaaacttataccaaatgacataagttaattttaatccattcctcttctccattcaccaaatgccgtaagttaattttaatccattcctcatctccattcaagaagtttcatacagaaccattgcataacaatggaggaatactagaaaaagcatgaagagatgtggctttcagccttggatccatcaactcactgcataaatttggacaagtcactctacctctctggatatctttcaagataatgagtttagatgagaagctctctaaggtcctgtcacatcctataattttcggtcagaatcttaataacgtagaattaacattacatgacatctcgtcaaatctgtctattgaatgaaatcttcacttacatttaagaccatctgatctttattaagattacatataaaattttaacaggacagaccaaagactgaagtcagtacattattagttcccacagatgctagtcaatatccacaactgtaaaattagtaatcttatggtatttaatcttatagtattaatcttatattaattcttcttatagtattaatcttatagtatttgacagcaactcttgagaataaataaaagtatatctctgcagtcaagtacacgttagtctatcccaaaagaggcttttttgagggaaatgaataacttttgttaaacataacattctatgaaataagtcaagtaccatataacccttctcagacactgtaatgcatatagaaaaaaaaatttaagttgtagaatacttcaaaattcttatgtggaacacagaaatagtattttgccagctttctctgtttctaatgagaaatagatattttattatatgataaaataaatcacatgtgacatcatttgttctctgagactatctctaaataattttgcttctttggctagttcttggtcatttacaattcaattatacgacacattaattcaaatagccaaacaaaaaacaaaagaagtaaaacataaaagttggaggattacacagtgtctatgcggctcttaataataagtaattggagaaaagaatgaaccatggtgttttgaccatctgagcattatagtccacattttccgactctttgttccattatatcttggatatgaaagcattatagtttactgtagtaattatacacttgttttttgcttcttttcccagatgtagttgttcttgccttcctctgaggttatctttgagtgaagttatttttctatttctgggtgatccagaaatgtgaattggtttttgatttgtctcacttctgtaggcgctggagttgtgacagtgtgtcattgagatattgagattgtgctaaatcaattgtgatgatgatgatcagaggattgtgacaactagcttatctaaaaagagttccactagcaaaaatgaatgcgagtttgatgtgtcattgacatatcctgggactgtcacctggctcaattccacttatttatttaatatttatttatcttttattgagtacaggcataccacattttattgtgcttttctttgttgcactgtgcagatattgcatgttttacaaattaaagatttgtggcaacactgagtcaagcaaggctatcggcatcatttttccaatagtgtgtgctcatttcatgtctctgccacattttgataactcttgcggtatttcagattttttcattattattttatctgttatggtgatctgtgatcagtgatgtttaatgttattattgttaattgtttcggggcaccacgaaccacatccacataatgaaatgggaaaagttcttttattctcccttgcaaggcatgcaatggggttgtggctcgcttctttggtgagcccctgctcagacctctgggggaacaggcagatgggcaggctgtgggtctcccaccctacagcagtgtctagggttgaatgtttacacctgtagccccagtgggcatgagttacagggtgttctttcagtttagccgtccataggcagcttgtgttagctcaattacaccctctgccttatcacaaagacagggggctttctgtatcccagagtttcttgccttggtataccagaagaatcagggcacacatgggcttggagaatgagttgagtgcaagttttattgggtggaagtagctctcagcatatgggggagccagaagggagatggagtgggaaggtggttttaccctggagttgggcccgttcagtggctgggctctcctctaactgccccggccaaacttcgcatcattccgctggttgacggtctgcaggtctgccagtgtctgtcagtgtgctcttacacaagtgcattcctcttgacgtccagccacttgtgtcttctgccagtctgttcctcttgacgtccagctgcttgtgtgcatgcccactagggtctcgggtttttcataggtacaggatgggggcgtggcaggacaagtggtcttgggtaatgcaacatttcggcacaaaataagaaatggctgtcctcacctaggtccgtgggcacaggcccagggggtggagccatagccagggacccacctttctctacccagaacttccctgccccctcccatatcaataagacaacaaacttaataaatcaaatgttgtgtgtgttacaaccgttccatcgaatggtacacccctgtctctctccctttcttcaggcttccctcttccctgagacacaacaatattgcaattagtccaatcaataaccctaaaatggcctctgtgtgttcaagtgagaggaagagtcacatacccttattttaaatcaaaagctaaaaatgattaagcttagtgaggaagccaatgttgaaagctgagatagactgaaagctaggcctcttgcaccaaatagctaacttgtgaatgcaaaggaaaagtccttaaaggaaattaaaagtgctaacctatactaacgaaaaaaatgatactctatatgaacacacaaatgataagaaagcaaaacaagctccttgctgatatggagaaagttttagcagcctggatagaagatcaaaccagccacaacattcccttaagccaaaacctaatccagggggaggcgctaactctcttcaattgtatgaatactgagagaggtaaggaagctttagaagaaaagtcagaagctagcagaggctgattcatgaggtttaaggaaggaagccatctctataacataaaagtgcaaggtaaagcagtaagtgctgatggagaaactgctgcaagttatccagaagatctagccaagatcattgaagaaggtggctacacaaaacagcagaatttcaatgtagataaaagagcattctgttggaagataacatcatctaggactttcatagttagagagaagtcaatgcctggctccaaagtttcaaaggacaggctgactcttttttatgggctaatgcagctggtgacaagttgaagccaatgctcatttaccattctgaaaatcacaaggcccttaagtattattgtaaatctattccacttgtgctctgtaaaaggaacaacaaagcctggatgacagcacatctgtttacagcatggtttactgaatatttgaagcccatggttgagacctactactaaagaaagattcctttcaaaatattagtgctcgttgactatgcacctagtcacccaagagctttgaaaggggctggagggaaggcagaaatgggctgcaaatgggctttgcaattatattaaggggtcttcattgggaaggaggattgttgaaggttttaaatgagtgtctcatttaaaaacatgttatctacgagtaacagaaattgtaattcaaaatggcttaagcgataagaaattttattggcttacataaaccagtgtccagaagtgagatggtccaggttctgtcctcctgcatttctcttggttctggcctctttcatttgatggtttaattttcaggttagatcgggtatggtggctcacacctgtaatcccagcactttgggaggctgaggcaggcagaacacttgaggtcaggagttcgtcaacagcctggccaacatggcaaaaccccatctctacaaaaaatacaaaaactagctgggcgtggtggcatgcacctgtaatcccagctactcaggaggctgaggcaggagagaatcgttggaggcaggagagaatcacttggaaccaggaggaagaggttatagtgagctgagattgtgccactgcactccagcctgggcaacagagggagaccctgtctcaagaaaaaaaaaaaaaattcaggccatatgcaaaacggatgcagcattccacatataacaaagtccagaggtagagagaatcgttttaagaaatcccagagacactttgggaggccgaggtgggcagattgcgaggtcaggagatcgagaccatcctggctaacacggtgaaaccccgtctctactaaaaatacaaaaaatgagccaggcatggtggcaggcgcctgtagtcccagctactcgtgaggctgaggcaggagaatggcgtgaacccagaaggcggggcttgcagtgagccgagattgcgccactgcactctagtctgggtgacagagcaagactccatctcagaaaaaaaaaaaaaaaaagaaagaaaccccagagaaggaactttaccagaagcattgttccacatggctccttgtttctcattggcttacctcagatcacatgctcattcctgagccaatcactttcagtaggcattggggcgctctagagtagccaaattcaatccttaagcctaaggcataatcacgttcatttgcaggactatgtgtggacgaggagggatgcacaaacaaaatccaatttccatagaaagaagagcgagaaggaaaacagctgtgagagcagtgaacgatgagctacccacctccatttagatatttgaaaatgtatatgactgtgttccacttaatgtaagaatataatggactgtctagttttgcatccagatacaagcccaggatatcaagaggtaaagtcttatctctcagtccgtgtcacctatgcatgatactgccaggtttcagacagttttcaggtgacttctattataacaccggatggctttatagtgacctaatgaaaggaggagggagtgaaccatcaaattaaaaaaaaaaaaactcttagatattatattcttcttattatagtggaatgcatacatctttaatttcatgtatacctaaactatttgtttcattacacttgctactgaactcagttaaaatcctgacctcagaatttcattgtggcttatatatgtctgggaaggaagattacaggaaggattttgataatgttctcataaaaacagccaggctagtacttgctaaaacatcactgctgtctctggatattttcttcctagactagacccatgagtagcttaaccaaagtgaagtgtcctgattaggcctaaatggccatgaatagaaaaacagagataatctcctgtcctatctctgagtctacttggcagaaattcccaggaactagatctctgttgttagaaaactctgcctatcaaggaacctactcctttccctcaaagtgaatattttatttttagacaaaaagtgggggtttcaaattcccgacagacatcttataaagaaaattaacacaagatttgtgatctgatatcagattaaatgagtttatttgaagaaaaagaaatcaactcttgctccatttttaactagagaaggaagggaaaatacaagaaaacagaagaaaaagagatgagtattctatgagaaatgttattttaatattaataagtttaaaacaattatcttttctggatagtagaatataggttctagccagatgatagctgagatggactttgagagaaataattgtaatgtggaggtttggagcccttagcaagttgatcggtagaagccagatccacaagttggtctgtaacaggaagactggaatgtcctaaagagaacatatgttgggtggcagaatccagatccatagcccagggaagggaagccacagcctccataacccagggatctgacgccactggacccacggcccactgagtagcagctcctagatccatagcccagggagcggcagctgctggatccaaagcctagagactcagagtaagtcgactggcagggactgcagagcacggagcttctggggcggtagcaggaggtctggcaggggctggactccacacaggacatctggcagctaggggtttcccagcaagtctcctgaaagcccttgcagagagaggaacccagctggcaggtgctgggagatcaaaggttcagtgctgtagaccaggttgctggggtacgaggagccaccacgggagtagcctgagtagcacaggtagccctcacaggaatgggaggagaagtttccacagcagcagttgtaggacatgttgacaggagatgtgagttcagctgagctgcattgagaagatgccctgatgtccctgcctgtgcccaatgatccagtgatgtttacaccctcacactgctgggcgtgatgcagtatccgggaacccccccattcttgtgaatgtgttttcatcaaatgactaagtaacctaggttataattataactcaacacattcatttgtctttaacagcagtgtaatcattccagtttatagaagcccattggcttctctctctctctctctctgtctctttctctctctctctctctctctctctctctgcagaaataaggtttggtttgctttcagaaacattggtgatgatacatacagtgcctccccaccccttttactgagcttgactgtgggtattctgagcttcagcctacaaattcttaccagcaatgtactcccaacagtaatcagcagccacccaccccccattatttacatatgttttattaagcattaactacatgcgcaacatttaaaagtgtggtatgatttaatctttgcaaatatcttatgagatacaagttgtcataaacaatttagaagtaaggccatggaggtttggaaaagttatgtaacattcaggtaataaatcaaacaaatcatggaccccatgtcatcccaggtgtgtctgtctttaaggctagcacaaaccacagagctatatagacaatttgtgaagcttgtaatttctgctcccagaatcacatggacaattgagtatgcaggtgaaaaaaaaattccaaggtgttaatatttgcatttcatctgatatatctacttgagtattcttaccccttttatgaattccccaaatatagccaactgaggggacagcttcttaattgattttggttatttttttagtattcagagttactatggagatgctttgttacaaattatcttctatttgccctctcactcagtttatcctagttaagcaactcatgttttatccaccatggagttattagattctttttcagtgtgaggcagaaaattctttggcaaacacagactttcactgggactagttgcgaaaaactgatatgcctttagtgagttgactaccaataaaatacatttgcagaagcttgaattttaatagggtgccgaccttttgccaactcagttgggagtgagaaatacgacaccttccagagtgattcatttcactccttgctgagcttctcttgttcatccttctaggaagacaaagcagcataaaatttaccattatattaagtggttaaaattatctttaccactataaaacatcagtggtataaagaaaaatcttggaattagaaatgtctttttccccacttgttatcatatccaacttctgccttcaagcatcttttagaaattggaaagcaaaaagctatttatgtaatttgatcttttcaaactgtttcatagatgattgttttttgtaatctcctgtaatatttgcttatctggcaacaatggaatattttgtccattgttttgctaacaaatttctaccaaatgcattgctcacattgcaccaaatccctttgtgaaagatgtaccaaaatggagtcatttatgtcaaactctaacaaaatggggtcaagagaggccacaaaaaaaatcctcgtgcacacatgcctgtaacaagggttatcacaagaccttcttcaaattgcactattccagataaataggttccaggacagttacctagcaacagctgtctttaccaataaacaaatgtcaactcctacaatgagcttttgacccgtgaacttgtctcaaagcagcttacctggacctctctttgtatttaaaaacttctcctgtgccctaaccccttggatgtgcctatgatccatcatccaccatagcatgcacattcctagattgcacttcgctgctctttccaattaaaactcatttgttctgaagagcatatgtgagtttctttttaggttgacacttctcatccctcaatgccaaaatcaaactcctcctatcagataggtgttcatctcaactagacttagctcttcaggaacaaagatctcagtattttgtaatctagttcacacacacacacactgtggaggatttgcaagggatgtactttgaaatggctcatgcaggatgaataatatttcagcttgcagggaaattacatatgtgagaagaacgaagaacgcaatgcacagaagttttgtggggtgagtgatgatgcttagtcttctttgacctaattcctggcacatcatgggtgctcatagattatttatatcaaataattaacttttattttactttcactcaagataaatgtatgcatgtgaaaataatgtttctgcttttaaagttacctctaattaaaagtgaaatgaatattaaatctatcttttataatgaatatatccccaagttaatcataaccagtaaaccaaggcctgttaagatagagcacctcttagaagatgaacggaggatggaaattatggttttagtgcgtaggggaatattctgaacaatctttatagtccttgtatgtgaatgtgcacttgttctcttctcattacacaaggcaacaggatcaaataaaccataattggtaaaggtgctcagttaggttagccagaagtctgggtacaactttacatggcagtagtattttaattatggcttctttccattatactacagatgcaaagaccgtacacactacccaggcatttctcttagctcaaattctccatcacaaccagctatatagcagctttcctgaatcactgtggtatcaaagtcttttaattagttttcctctattcctgtagccatatcaatgttatttaggggatgtccagcagtctattatagccactattaatctcagctattttataatttctcaaactcaatgtaattttttaaaagataaaaaataactacaattttttaaaattaaaaatgtacgtaagttacttttggaacttggaatactcttctaaaaatagataccactataattttttcagaaagtaaaattcttcatatatgtaacttaaggcaatgcaatagttttatttatttatttatttatttatttatttatttattttttaaacagggtctcactcccatggcccaggctgaagtgcagtggtgtgatcttggctaactgcagcctggagttcaccagctcaagagatcctcccacctcagcttcccaagtaactggtactacaggaaggcaccaccaggcctggctttttgtttttttaatttttagtagagatgtggtctctctatgttgcccatgcttgagctcaaatgcctgggctccccaccttagcctcccatagttctaggattacaggcatgagcccttgtgcccggctttatacaatagttttaaatataaagagccacttctttattaagtaaattagaagacatccctctaagaatttaaacacatttaaatatatattcactatggatgtgtgtatatctatctatctatctatgtatctccataaattttgagaaagatcaaatattatggttatatatttactgaattaggaaattttgccgaaatactttgcatcactcatgtcacctttttataaagctgtttggatctgaaagtgctttcgtggatttcacactaatgctttatagcattgaaggagctataatcatagaataataatttgtcatctgaggaaatgatgtcatgcagtcaaaaagctgcaagcttgggattggaatgcatgtccctggctctgagtccaattctttcttccagtaggctggtgcaaaggtaattgtgatttttgacattaaaagtaattgcagaaactgtaattacttttgcactttacatgatgcaaatgcatgaaccttaagagaaattgtatattctcttcactttgtatttccataaacatggccctctagcatgcatctcatatttgtacatattattgaatatgtctcctttgaaatgttgaatttcccttactttgactgtatcaatatgttcattttaaaaatcaaaatctcttacaaatttcagtgcttgaagtgatcctcaatatctgtcctcaatccatatcccaagcaaaattgcctttggggccttcctaaattatttttctttctctttctaattgcttcattctctttcattgtaatggttcttttattctcagccttataaccatgctcaatcttcttcaatccaaaaattttaaatagtgccattttctctatgattatatagctcttcttattttatatcagaattatctaaagaggtatggaatcagcttgtcagctacctcactttttattctcttttcaataactgatatgattaggctttgtgtccctggccaattctcattttgaattgtaattgcaataatccccaaaatccccgtgtgtcaagggaattaccaggtggaggtaattgaatcgtgggggcagtttcccccatgctgttctcctgatagtgagtgagttagcacaagatttgatggttttataaggggctcttcccctttcactcagcacttctccttcctgccgctttgtgaataaggtgccttgcttccccttcgccttccaccatgatcgtaagtttcctgaggtctcctcagccatgctgaagtatgagtcaattaaatctctttcctttataaattacccagtcttggacagttctttacagcagtatgaaaatggactaatacaattaccatcttgtttctgtctggtttaaaactcttctggaattgctctgacatggtcagcagtagcctcaatgctgccatacgtgatgtacatttttaggattatcccatgtgaacatttaaccatattcaacacaggcgactatgtccttaaccttaaatcttgttcatctatatacttccatgagattacagttctagtcttctatctaactttcacctaattctttgttactattagttggatttctttcataatattccttaagacttggcgctgatccctggacatattctctctatagaggagacatctcccttccatggcttcaaataccatccatattctgtgacactgaaatattcaaattatctttccagtctgtatagttttttcttttttaattctagacctaaatacccaagtacttcttgccattccacttaaaggtttcataagggtgttgaacttctatgtgtatgacattgaacttttgctcttctcttgtgaggcagaaacattttttgtttcctattagtaaactgcatttccacctatctagttgtttaactgagacaatttggaatcctcctaacatacgcaatctaccctgaggattggccattttctttcccaaatctgtcttacatttatccagtcctattactgctttctgtgtagttcaggatttctcacccttggtaccaggggcatttagggctggatagttttttgttgtggggagatatcctgtgcattgtaagatagttggcagtattcttggcgtctacccactagatgccagtagcacaactcccccttaaaattacaattaagaatgtctctgaaaattgcctaggggagagagcaaaattagccctggaggaaaggcattgtcctagtccaaggtagtctcctttcttggtggaacaaccaaaaataatgtccaagattctctgcctctctttttaaaaaaaaaattgtctcctccagtctttcttctacactcctgcctgattttttctttcattctttcttttctttctttcttttctttctttctttttctttctttcttcctttttctttcttttctttcctttctctctctccttcattcttcctttcttctttctttcttccttccttcctttctttcttttccttccttccttctttcccctttcctttttcctttactgttcctattctttttcctttcctttttcctttcctttcctttcctttctcctttcttttctttgccatttttctgcctgatctgaaaacaaaaatctggtcatttcactttcctgattacaacttcctggttgacttaccgtacattgaggatgaaacaaatcctctatatgatctgtaaagctgtgtaattgagtccctgctcatgtctctgacttcatcttcatacagtgttctttgtctttctcacaaacacactggtctttgttccacactaaagtatctcaagctttttcctaatccaaggacacactcttctctctgccttgaatgttttttcttcatctggatgaaaataattaagccttttctcacctcaatacattatatctcaagataaagtaggttctcctgttgtgatttgtaatttatctctgtacttaattctaatatttaaaaaaattgtttatttcttagactgtcttctagactagagcagtgctactagacaaaccagtccatgacagttcaccaattggccataagttaagtgtgtatatcaatatgcaaatgaatgcatggctaccttccttaagaagtcttgcatgattaacaatttcagcttaaggaaatcatatgtcaaatatacctgctttaccctgtaccctgatctatgatccactctttgaatgacacatctctgaattgtaatatctaaagttgagttggaggcaaatactatctgtgttctttcttatttgacattaaattctcagctcaagagtagtcaaagttgttgttcaataaatacttaatgataaactagataattactggttttatcattgctgaatatctcctatcttatcctgttcctagacctctaaactcctcttgaatgctttacaacagtaaactcagaggagtctcaactgccctcttaatcagtaccacctggcccagacttgcttctattcctttgcaccctaacttagctataatagaccatctatagtctgaatactaaataaagacttgttaaactgaaccatcctgtccaatttttttaatatagcaaagtgaaatttgaaagctagagagattcatttcaagtcaattcagcaagcatgcagtgaagtgtaggcattgtggtgagaggtgagaatagggaggtgagtgagagatagccctatccctgaaggaagcatgtcttaatctttctctggaaaatgagtggaagtatgttaatagaagataagtgactttagagaaagtgtgtcgtagtccattaaattcaatcacttttgctgttctttcagaccctgaagctactagtcaaagctaaatagagtcttagatcctttgcatttacatatcctgaattattttgaatcttgttagtgttttatgtagaaaaatagtaattcttggattaaaaattattgtaggctatacgattttttccctgcttgtagaaagttggctgtccttgctctgactttacacactgcttctgacaaaatcaacagccaagctatccaaatagtaattcgtcatagtaaaaatcatgcaacttcagtaagccaacaacttaaaaaagctcaaggaaaaactgtttatacttgaattccttaaaagattactttattaaataatagcatttctgtcacattgtaaactaacgagcacatgaaataccccctaatttctattacatataatttcaattttcagacataaatttttagtgtagtttctcaattttttttttttatcatataatggtgacagaacctgtctctctaagagaaacgaactagtttatggtcaaccagttcgtaaaacggcgtttgtggagatgaatatgagggaaagcagcatttcctggcagtgtatgaagaggcattaagccaatttgtagaagccatgcctgtacattggtctatagcaagttgacaggcttttcttagtagagaagtagtttgggtggcaagaagctgggaccgtaattcaagctttgggtactactgggtctataacttaaagattggaatccattgaattcatagcctagaaagcaccctgtggtagaaagcatgatgtatgtctgccggagggcttatagtagctcatctgagagtcttacagagagacccgtcttggtggaaactagaaaagcagaggtcagtggggtggaccaagtagctggggtaagaagagacacaggattagaccgagtagaccaagagttccccaagtgagcaggaaaagaagtttccagtgtagcagcttaatgtgtgactgctgtatctgattcactttttattagtgtcaaagggtgtgtaaatgtcaccttattgcctagaaacttatgtgctctgaccctgtggttatgatgttttagatgcccagctttactattcttctgccttacaatttgactaagaatatctccttagtgtgttgtccaatttcagctgaatagattaacaccatcataaatatgcatacctgtgttttataaccaaaagccagtttactgtcagtcttggacttcagatgattgttgcatggtcaaagcaattggtcaatcattggcagattaatttttgactgagaggatcacttagaggatgctgagatatagctattttttttcctccctgcttaaagttttatattttgttgtgattcttttctcggtcattcctgatatggtttgccatattaccaagcgcatgtttatgtttactaacaactaatataagaggtagaaatgatcatgatactctaaaaaagttgaaaaacttttattaaaaaaaaattctacttgactctctttaccagctggatgggtatagaatgccttatataaggggacttaaattacatcagttaagaagatggaaatttcaggccaaatacttttaaaaagtaatctccgttgggcacgatggatcatgcctgtaatcccgacactttgggaggccgatgcgggcggattgcctgagctcatgagtttgtgaccagcctgggcaacacggtgaaaccccgtctctactaaaatacaaaaaattagccgggtgtggtggtgggtgcctgtaatcgcagctactctggaggctgaggcaggagaattgcttgaaccctggaggcagaagttgtagtgagccgagatggcgcccctgcactccagcttaggcgacagagcgagactctgtctcaaaaaaaaaaagtaatctctcaaatttatagtgtggaaacttttaatggccccttagggactgcgtttataagcagtaaaacagatacgaaattattttcttcaagcaccttgaaaattgctgaacaaataaaaagttccaaagtaatgttgtagatagtcacatttccttattatgagagaggggaaattacatctacagatgagcctagataaagcaatgtggtggcctggagaagagcagacattggtgaggacaagaaattaatggcaaagaaatgggtctaaccagaaacatcatagaataaaataaattttaaaaaatggatacaaaaaaacattaagggaatggtgacttaggttacacccaggataaaaatataaaggaaataaagtaaaacacacttttttttacatatgtatgatgtttgggagggaatgaattacagtattgtgcactctagtggatatgttaaatgttttgaaattgacatgtgtaccgcgtaaatgtttaggagcttctaaacatttaaaatgtgccaaacaactaatacatgttgttaaatactaaacatattttaaaggtataaaatgtgctaaatatttataatttctaaacgtttaaaacattttcagcaaaaaatgtttagaaatatgtttaggataaatatttcattttagtgtgcataaaagaatatgacgtgtatggcttactcgaagcacccatgtgcatttagtttttggccacaagttgcatacatttatagtctaataatagttaacatttatggagtgatttctatactcaaggaattcttccggctgcttcacatatcctatcatttgcctctcatcgtaaccccatgatcaaatttctatcattcatgatctctctttaacatttaaggaaactaattttttgagaggttctataatgtttacagggcaaatagctggtgttagagttgggaattcagatatataaatatatatggtgcttcttcaggatttacatgctttgacaatttaaatgggttcaatctcacagcaggcagagtaatgtgcaggtaaaaaaatacattattaactaaatgcttaaatcttctaaggaatgtttctaaagcacaaaaactgagaagatcctggaagtgtagaaaccaaagtggggaccctgagcatgacattctgatgattaagcactcctattatctggaggacagcatgggagaccaggcaaaacttgggatatcagttggttactagacctagcagccctgactcctctgtctttttaagcaggttgatccttacaaactatttaccttccactagaactatcctagatcttctttcattttaggaagattgttactgttagtaatcaagttctgacttaccaaagacacgtagccactcaggaatcatatgcctattaacaggcaggactcctttggacagtatcaattctacatgatttcagcaacttgagggcaatgcaccttcattttctatccatattggaaaggctttaaagttcagccagcaaagatgataacttatggtgtccattcattttgagtttcaagaccatcgttaagctacgtcttgtttgtcatccccaacagaaccatagtagatgttcactatttgggtaatggatacactaaaagctcagacttcaccactatgcaaaatatgcatgtaagaaatttgcatgtgtaccatctaaaaatataaaaattaaaaaaaaaacaatggtgatgtagtcatgattatctgttgccatcaagaatagaatgtgttagttatgctggtagtctaatgggtgcctagtggcattctgttttaatgttggtttttttctaactttttagtagctctcattatatactgcagtaattaataggggtttgcccagaatagtatttcaacaggtaaaagattactttaaaaaaggtttatgcatttgtttatttttctacctgttttactcagactgaacataacaatcagttaaaatttagaaaagcaaatatgtttatttagttacaagtaaactttattacacaaaatttatttttagccatagttgaaaaaacaacaatttatttgcttatactcgaaatagcaatgccctatgggaatctcagtaatgccgatcaaagtcctttctatgcttttcctgcttgctaaaaggagactaatatgtgaacactgacaaacgtatgagaatcatatattgaggggaatgtgctcagaaaacaaagatgtgctcaaaggacaaagatgtctgaggcacagtaccttcaagaaattcaaaatctaaaagctcatactctatataattatcatatatttcttataatagacttatgatttattttcataaatattttcacttctcagattatttcacttctcagataaagatatatttatcacttctcagataaagatatagagatatattaatattttcacttctcagataaagatatagagatatattaagtaatttgttaaaaaattattttaacaaaaagttataaatccaaaaagtgagactagttctgtctgtctgcagatatttcattattcatccctactttctgtgtttgttaagccatgatataaggctaacaaatgctgaggataaaatgtatgacacaggtgaggtgattttattattaagctccttagcacttaaaactcctcagaagaaggacgaaagtggagggaaagaatagactatcccagacagagtactaatgcaaatgacagaaggtagggagtagaaaaacaaacggcagatcattttaggatccataactgtattattttcttgtctagaattttaaaataaaaccttgctgagtagaattccatctcatggcttcagtaaatgtaggcttctgtacaaaacgttactctccatgtgttcacaattgattaagataacatttctgcatcattttccccagaatgaagtttgcagctcccaaggatgtactaaatgtggttgactgtttttcctgttctctctagtgtaataatagaccatggtaaattaccctaagattgtcaaagctaaagcatttttcaaatttggtttataagctggagaatatgaacagccaatggcacctcttcaccttacaatatctgtagaacacagacagtgaagtctctggaatcaattttatagtcaagacattaacctttgtggtcatttgcccagcagaaagagtaagctgttaaaaaacacaaaatcagccactattcacctctttttatgattatgagtgtgttaacagctttcccttcaattacatgactagggttattttgccagtaaagtaccaaaaagataatatataccagaagcaaatttagatattgtctctttgcagaaatgccctgaaatgagggcaatcactcattactttgagtatagattttaactaaaatttgtttgactgaaaattacaatattatctagcccaaagaaacttgggaaaaacagtgttgtgtttctttcaactccactgtccagaagaagaaaactagaattctccctctcattcttttggaaagtcataaaacacttgagcatattaacaaacttttaaaaaggataaaaacaaatctgattaatgtggttagcccaaattaatcatataaatataaactttgtatccaatctattaatatttcttaaaaccagtgtctcaagcaattaacatttgaggagaagggctttagtcatttgagattggaatggaatggtattactggtatagttcaggaaactaactggagattaaagggatacctactaaaataggtggcaaacattaaagaaaagaaaaaacttagggcaatttctaattctttgactttgctcactacttctatagctacccttactagattaagaacttcctatatcagtaactacatcttcttcaataacaatcaagctgagaaacgaatcatcaactcaattccatttacaatagctacaaaaataactaggaatacattgaaccaagaaggtaaaagagctctacaaggagaactataaaacactaatgaaagaaatcatagatgatacaaacaaatggaagagcatcctatactcatggattggcaaaatcagtatcattaaaatgaccttactgcccaaagcaacctacagattcagtgcaattcctatcaaataacaacatcattttaatagaattatgaaacctaaacttcatgtggaatcaaaaaagagccccaatatccaaagcaatcctaagtaaaaagaacaaagctgggtcatcacatttcttgattttaaattatactacaaggctataataaacacaacagcatagtactgtataaaactagacaaatagatcaatggatcagaatagagaacacagaaataaagccaaatacctaaaatcaactgatctttgacaaagtcaacaaaaatatacacaagggaaaggacaccctgttcaataaatggtgctagggaaactggattgtcatatgcagaagaatgaaattgaatccatatctttcactgtatacaaaaattaactcaaaatggattaaaaacttaaatgtaatatctgaaactataaaaaccccagaagaaaatgtaggaaatctcttctagacattgacctaggcaaagaatttatgactaagaccgcaaaagcaaatgcaacaaaaacaaaaatagaccaatgggacttaattaaactgaaaagcttctgcactcctaaagaaactgtcaacagagtaaacagacaacttacagaatgggagaaaatatttgaaaactatgtgtccacaaaaagactaatatctagaatctacaagaagctcaaacaactcaacaagaaaaaaaaaaaaaccactatcaaaaagtgggcaaaggacatgaacagacatttttccaaagaagacatacaagcagccaacaaacgtggaaaaattctcaacatcattaatcattagagaaatgcaaattagaaccacattaagataccatcttacagtaataagaatggttattaaaaagtcaaaaaacaacagatgttggcaaggatgcagagaaaagggaacactgttggtaggaatgtaaattagtacaaactttatggaaaacagtatgaagattcctcaaagagctgagaatagaacaccatttgatctagcaatcccattattgggtgtctacacaaagaaaaagaaattgttatatatattaaaatcccctgcactggtatggttatcataacactattcaccattgcaaagtcatggaatcagccaaagtgtccatcaatgaatgactgaattttaaaaagtgatatataaatgcaatgtgatactactcagccataaaaaagaataaaattgtgtcttttgcagcaaaatagatggaaatggaagccattatcctaagtgaaatgactaagaaacagagtcaaataccacatgctctcacttattattgcgagctaaacaatgtgtatacctggatatacagagtggaataattgactttggagactccaaaagttgggagattgggagaggggtgagggatgaaaaattacctacaatataaactatctgagtgatggatatactaaaagcctggagttcacactacgtaatatattcatgtaacaaaactgcatgtttacccttaaatctataaaaataaaataaaatagaactttagaacagaagagtttccatacatcaataactgcatcttctcactttagttaacagactttagtattcttatactaatcttccagaaatgccaactaaaaaccttataacacatcttactaatgaataatctacttatgttctccacacgtgactaacttttgttaaacttaaaaaaaaaatcataggctcacatgaagttgtacaaatagtacctagagtcccttcacacagcctcctgcaatattgccaacttatttaaccatactacaaaatcaaacctaggaaattgacactggtgccatgttgttcgctagactacagaccttattgagttttgctggtttatacatgtactcatttgtgtttgtatctgtatggttcaatgtaatttatctaatgtatagattagtgtaaccactaccacagtccagaagaaaaattcttccatttatgattaacattttttcttttttttttagagacagggtcttgctttgctgcctaggctggattgcaatggtgcaatcaatagctcattgcagcctggaactcctggcttcaatactcccgcctcagcttcccaaggagctgggactacaggcatgcaccatgtgtatgaattacaatgttcatgtaatgaggcagaaatatgagccacatattttgtccttttatatttataaaatgtttaatttagttatatatgaaattaaaaatggaagcttgtgttttctagacaacaacactagacagtaatgcagcatttgaggtgagtggtgcaagtggtggtatagagcagaaagaaagatcaagtcaaaatacgacacatttatgtaattatgtcattttttccccaagtcacaagtagaagcagtgccattagaaatgtcaaaattttggatgaacctggaggacatcatgctaagagaaataagccagacacagaaaggaaaatactacatgatgtcatgtatgtagaaatcgaaactagttaaactcacaaaagcagagactagactggtagctgtcagggcctgggcggagggtaaattgggagggtgttggtcaaagggtaaaaagtttcagttatgcaggacaattaagttctggatatctaatgtatagcaatgtgactgtagttaacaatattgtatcgtatacttaaaatttgcagaaagggtagacctcagtgttcttgccatagtcaaatgatcaatcaaatggaaactgaaattataactatattaattaccttgactgtgacaatttcacaatatgtgtatatattatatacagtgtgtgtatctcaaaacatcaatttttactccttaaatttatataatttttgtagactatacctcagtaaagatgagaaaaagaaaaaaggcataaattgataaggtaaagtaattctttccaggaaatgatatgcataatttcttttcctcctcagtttccatattaaaggaaaaatgatattcagacttttgtagcacatctgttactaagttttacaattaacattactgatttcacatactgttgtcagaaaaaattgtgggattttgaaatgggggaaatgtattactatgtggcctgtctagttcatttttcaaggtattgtcacgtattattgctttttaactcctatataattctgtaagttgaataaaattgttaataatgcaaatgattctagtccatagaaatgaaatagtttctgtcaagtggaatgatactgatttttactctgcgtacagcactactttgcatctatctgtggattcatttcaaacttcctaacaacctgtctaagtgttctctgaattatgctttgaaccagttgtagcatcttagtggtccccacatttattaatgagttaaataaaaatttttatatgtgttgattttttcatttgtgtaagaattgtgactttacctttttaaaaatttatcttaatactattatgttttatattgtatcacattttaaacgtttgccttccctttctttaagttccagggaagcagcatgcaagacatagtgagaaaaaaaaagaaaataaaaatagttggagatcaacagagatgagatattaggattggattaaccatgaatgatttcttttgaacagctggatagagaattctggacttgaacagtagatacctgatgttttcttaattcatactgtggtgcctctcaagtaatagtctgcaaccctgagcttctgcttgttaatactttattagactgctaattgtaactaagtctccagttacataaactttgatatctaagaataacatgagccccccaaaaccactcccacatatgaaatgtgaagtttatttttttaattgtttatcgttgacatcttgccaccccagacacaaagctgaggccctctatggcatccgtgttgtttccgtctctatttctggatttgtagaattggacaatcacacttacttattattatgtagtcttctacctcttgctgaccacatttcccagtttaataaaaaaggaacttgtagttttgtccccgaaacccacactgtattcttccaagcaattatgccaccgcttacgcagtttcctcttgctggcgctctcttctcacgcatccttcacaccaaaatcataggaggaaatttgtctctctcactagtgagagacatgagtctagtgacattggtcttttctaagctctcagcacttttcacagaagagctctagtgcaaagttaaagctcaaacacatctagtgagctgaattagaacaaagagctgatgtcacttggtatattaaggtcattaggagtggaataattataagtgagcttgaaagcaacttatcttttccactctgctttttcttagccagtgatgggagtcagccttccattacactctctgttaccctcatacaacttaggcgttgacccacagttaccaggtgcctaacttgacagcaccctaaagggtgagtgtggagaggagcagagtgtacataaaaactgaaaaatcacagagagaaggagagaaagaagaaaagcaaagagaaaaggtgagagaggaaaataaaaaatagttggagattagcagagatgagatattaagggaagattattcatgcagaaaatggaggaggcaaagaatatttattttgtctgatccctgaaatctgaatcttcacattatactttgaaaggtttaaatattgaaagtattccaatgtgttaattttctcctttactctctgcctccctgtctcaattgtttgcattccacttaaagattgcattagaatggtggagattcttcaagtcactacagaactagattctctatgtcactggacaccccttccttctatcttgggattgctgcattttaaacatttctctgtgctcagatgtctccttgcaaggcctggtgccttccacacttgaagttatgagcctctagctcccaggactttcttactgtccatgctactgtgacccctttagtttgttttctcaaatgattttttttaatccacattttactcattccgcattatttaaagatgaattagtagtccaccttcaatgctaatggcataattcagactcataggacctttatgtctaataaaaatttttaattacctatttacaccaaagtcaatgagtagctctgcacttgatgacatatttttttttttttttttgagtcagagtctcacactgtcacctaggctggagtgcaatggtgcaatcttggctcactacaacctccgcctcccaggttcaagtgattctcctgcctcagcctcccaagtagctgggattacaggcaccagccaccatgcctggctaattttttgtatttttagtagagccggggtttcgctatgttggccaagctggtctcaaactcctgaccttgtgatccacccacgttggcctcccaaagtgctgggattacaggcatgagccaccatgccctgcccaacgatacattttgtttgtttgtttgtttgtttgtttgtttttaattatactttaagttctagggtacatgtgcacaacgtgcaggtttgttacatatgtatacatgtgccatgttggtgtgctgcacccattaacttgtcatttatattaggtatatctcctaatgttatcccttccccctccccccaccccacaacaggccccggtgtgtgatgttccccttcctgtgtccaagtgttctcattgttcagttcccacctatgagtgagaatatgtggtgtttggttttttgtccttgcgatagtttgctgagaatgatggtttccagcttcctccatgtccctacaaaggacatgaactcatcattttttatggctgcatagtattccatggtgtatatgtgccacattttcttaatccagtctatcattgttggacatttgggttggttccaagtctttgctattgtgaatagtgccgcaataaatatatgtgtgcatgtgtctttatagcagcatgatttataatcctgcgggtatatacccagtaatgggatggctgggtcaaatggtatttctagttctagatccctgaggaatcaccacactgtcttccacaatggttgaactagtttactgtcccaccaacagtgtaaaagtgttcctatttctccacatcctctccagcacctgttgtttcctgactttttaatgattgccattctaactggtgtgagatggtatctcattgtggttttgatttgcatttctctgatggccagtgatgatgagcattttttcatgtgtctgttggctgcataaatgtcttcttttgagaagtgtctgttcatatccttcgcccactttttgatggggttgtttgttttttttctcataaatttgttggagttctttgtagattctggatattagccctttgtcagatgagtagattgcaaaaattttctcccattctgtaggttgcctgttcactctgatggtagtttcttttgctgtgcagaagctcttttgtttaattagatcccatttgtcaattttggcttttgttgccattgcttttggtgttttagacatgaagtccttgcccatgcctatgtcctgaatggtattgactaggttttcttctagggtttttatgattttaggtctaacatttaagtctttaatccatcttgaattaatttttgtgtaaggtgtaaggaagggatccagtttcagctttctacatatggctagccagttttcccagcaacatttactaaatagggaatcctttccccgttgcttgtttttctcaggtttgtcaaagatcagatagttgtagatatgtgacattatttctgagggctctgttccattccactgatctatatctctgttttggtactggtaccatgctgttttggttactgtagccttgtggtatagtttgaagtcaggtagcatgatgcttccagctttgttcttttggcttaggattgacttggcaatgcaggctcttttttggttccatatgaactttaaagtagtgttttccaattctgtgaagaaagtcattggtagcttgattgggatggcattgaatctataaattaccttgggcagtatggccattttcacgatattgattcttcctacccatgagcatggaatgttcttccatttgtttgtatcctcttttatttcatttagcagtggtttgtagttctccttgaagaggtccttcacattccttgtcagttttattcctaggtattttattcctttgtagcaattgtgaaggggagttcactcatgatttggctccctgttagtctgttattggtgtataggaatgcttgtgatttttgcacattgattttgtatcctgagactttgctgaagttgcttatcagcttaaggagattttgggctgagacgatggggttttctagacatacagtcatgtcatctgcaaacagggacaatttgacttcctcttttcctaattgaatacgctttatttccttctcctgcgtgattgccctggccagaacttccaacactatgttgaataggagtggtgagagaggttatccctgtcttgtgccagttttcaaagggaatgcttccagtttttgcccattcagtatgacattggctgtgggtttgccataaatagctcttattattttgagataagtcccatcaatacctaatttactgagaatttttagcatgaagggttgttgaattttgtcaaaggccttttctgcatctattgaaataatcatgtggtttttgtctttgcttctgtttatatgctggattacgtttattgatttgtgtgtgttgaaccagccttgcatcccagggatgaagcccacttgatcatggtggataagctttttgatgtgttgcttgatttggtttgccagtattgtaaatctttgtatgagagtgccagaagtcttattttatttcaattattttatttagtttaaacctaaagaagactttattgacccatatgatcaaagcacttaaaggatgaataaagctggcttaaggtacatgggaatcagaggcttctgtgttgccaggagtttcttcccgtgtttcccttctctattcttctagtttctgtggcggcaggtttctatgatcagaggatgtggttcccacacttccatgcttagcccgtattgtctccattataagagaaaagataccctcttttttcaggtttaattataaaaagcttaagggaaaggtgtcagggaaaaaaatcaattaaagctcgtgacatattattggaggaaatgataatctttcaaagttgttttcccattcatggagagttgttattgaatattttatgaaaaagttttagctgaacttttacactacctttagcctctgaaagaaatcacttgcttaaattaaaataaatagagaaggtcttatatctcagatgtgaatagcatcctacaaatatttatttttattcacactgtcacagctgagcagtggattccaaggatactgagggaggttataaaatctagaacattgaaagtaatctaattttaactgccactcaatgcagaaatcactgaaaagtaatatctttttccttgttgataaactcaataatccaaagaaaacacaaaggtcataatagttctataaatttatgatttataaatatacatttaaaacaagccaaagtatttctccctataactgtttccattactcacagttgtaaaccttaagtctttctgtcttctgtgctctctctctctttctcacacacacacaacacaaacacacacacacactgaataattaattttctcctatatttaaacacaaccgtaatgtcctccagtacctaacatttcatattttcccttttccatcataacatttcagatttattcaaatatttcataattttatatttaatcacctagttgacatcttctgagaaaactctaaatactcttttaaaaatgtaaacaaaaagcaaatatgattgtcagcaaaatgtgtcttccttgaaaacacaccaccattatgagtgtactctcaataattctgttaagaatccaaccagttttcatggcagaagacatgcacttgctcagtcttttaggcactggcatgcccggagaatctccccacacactaggcctgatgacattaccgatggaaatggatgtccaaggaaaagacgtctgggggcctggagcccccaaaacagatcacaaatcaaactttggaaaccaataaaagacaaagagaacatattggaatcaacagtaaatgaatttattacgtgaaacaaaactgaacttccatatactttataagatgaacttacgtgataacgaatcacttgtttcaaaattatagacatttgactctatattttgctcattcattaatttcacagtctgaaagaactagcctgtccagccagtacttgatgccagagaaaggatgaagagctagtagtaagaggggttagctcacattgctggaaatgcctatgataacagctctacgtagagactgagacactttgcttaaaaggtctggaaattcagcaagttgatctgcagaaggttgatccataggctggtctgtaacaaggagactggcagctcctagaagccaagtaggttgggcggcagaatccagatccatagccgagggaagggaagccacagcttccataacccagggatctgacaccactggacccacagcccactgagtagcagctcctcgatccatagcccagggagcggcagctgctggatccaaagcctagagacccagagtaagtcgtcttgcaaggactgcagagcaaggaggttctggggcggtagcaggaggtctggcaggggctggactccacataggacgtctggcagctggtgggctcccagcagatctcctgacagcccctatagagagaggaacccagctggcaggtgctgggagagcagaggtcagtgctgtagaccagattgctggggtaggaaaagccacgtgaggatgctgggtagcgcaggtagtcaccacaggagcgggaggagaagtttccagagcagcagttgtaggacatgttgacgggagatgtgagttcagctgagttatagtggaaagattctctgagtttgaatgtcatagtctggactccaagttatatatgctcttagacctgggtgtgtccactgtctcgacactcccttctccttgctcactttttattataagaatgcttccctaggttattgtttaatttatcacatcttcatatacttacttgtactttagtcactctggaacacttagaaggaagccactcagtttttttttttcctggaattcactgtggtttgaccttcaatgttatatgtcatcacatttatgagtatcttgcctcttattatttgagtacagtgagtccttattgtaccaaatggaattacacaaaattctttctttacttcccttaagttatcaggagcatcagtggttactactcaaaatagattgtccttctttttaacacaagcatattatttgttaccagaaacggaggatttctccaaatactaactgtattcagtagcctcagcaatctgtcagttaaaccttttactagtaccttaagagctcaggatcagaactgaggagtgcagcattatgttgggtgtccatatcaggcatcttccttaacaagaggctactttagacaatgctcacttaggaaacaataaacacaaactttttagtaagactttaaattgaagtttttcagatattttctgatgaacctatcttgtagcaagcactattctatggttatgctctaaatcaactcataaattttattttgttttatgtttcaatttttttttctggataaaaggacagattcttagctgcaattattaatttatacttaaactttgaggaattgttaacatttttctgaagcttttaacttgaagtattagagttatatgggtctttaaacatcccctgttcaacccatacatggaaaaattacctctcagagagctttaactttcccctaatttctcagtaagatagaagcaaaattgaagctttaattatggttttcttattcagagtcaagttgcaaataccttgcaaatataaaagtaaattcaactttaacttgtctcagaaaagaaactattaagcttatttatactaagatataaaagcctaacaaagccttatttacttttcctaacaatattcacactgaatagtgttcaactggggaattctatgccttactgatcttcatacatttgaagtatatttcacttcctagcccaagaaagagaaagaatattggtaatccatgtttagattaatggggggaagaggcttcttatctgtgtctattcttcttcttttgaatttgacattttatttggtttaactaagggaaatggcattcacaatggttatcgaaaagagagcctcttaactacctgaaaattaacttccttcattccaaagcacactgtttcagagcacttagttactttgttttatgattatctctcccatgcagaatccaaagtgtggcatgcatcacatgaagtgcccttgtgcaatacttaaaccatcactctgattcactgaagtaaaataagctgtgctttatgaatggacacctattaaattcaccaaaaagtatgcaccacccccaacacatgggattccttataatggcagcttttaacacctttaaaatgagaaatatttttcttttcttactacaggttgattctgctcaaaaaaaagaaaacaaaaaacttactaatatccaaaagttcttgcctttctagaccagctccctatgtctgggaataaacactaaaataacttgggagtaagtcagttccaattaacagtccctccacccattcctaattgggttaacactttttattaggagttatttgtgcactttgtacaaatgctaatgaacaactcccaaatgctaataaatgtgtccatctgaaaggcagaaaaagcagaacaaaactagagtagccttaacagttcaaaagtggattctggaactaataaaatactctacgtactctacatacacaggcaaagtattagtatagaaagaaaaattcactatcttgatatgtcagggaaaacgtgatattgaaatcttttctctctctctccttccttccttccctccctccctctttctttttctttttctttcttttctttctctgcctctctttccttttctttttctttcttttctttccctccctccctctctctctgcctccttccctccctttctccctctctctctttctctgtttctctttctttctatttctttctttcttttctctttctttctttcttctttctcttttctctttagaaatttaggcataacaacactacagagaataaaactatcattacagtacacagtagccacaagtagcctatgatctgaattacttgaaaagtgattgtttttccaagttaacatagtaatgtagcagaagctttaaactgacaatcttctattgcaatgtttccagagattcttcaaaagctttcaaattaaccaaatattaggcagtagtagaaatagtaaaaatccatatatactgccctataccttttttactttcttttttttttttttttttccgagacggagtctggctctgtcacccaggctggagtacagtggtgcaatcttggctcactgcaagctctgcctcccgggttcacaccattctcttgcctcagcctcccgagtagctgggactacaggtgcccgccaccacgcctggctaattttttgtatttttagtagagacggggtttccccatgttagccaggatggtcttgatctcctgacctcatgatccacccgcctcggcctcccaaagtgctgggattacaggcgtgagccaccgcgtccggccacctttttactttctgttcactttttaattttctgccttctctagacctaggagaggcttttattgtctggtcactaaagagtcttcataacagctgctttacactagattttatttttaaaattctcacccaaggggaaatgtatctattaaacattaatgctaactatgaagaacccactactgagtaaaggcttgatgagaactccctggactaacctgttcatggtctcttcccagtcccccatgcaagcctacccaggcctgtggctttctcggaggtcatccggcctcattgtttgagacttttccaggccctggcacctcctctaacttcactacagctcttcctgcttcaaattcatccattttatgtcttcatcatccatgactttcgtttgaaataaaaaggccaggctgggcgcagtggctcacgcctgtaatcccagcactttgggaggccgaggcaggtggatcacgaggtcaggagtttgagaccagcctttcaaacatggcgaaatcccgtctctactaaaaatacaaaaattagccaggcgtggtggcagacatctgtaatcccagctactggagaggctgaggcaggagaatcgcttgaaactggaaggcagaggttgcagtgagccaaggtcatgccactgcactccagcctgggcgacagagtgagattccgtctcaaacaaacaaacaaacaaaaagatttataaacagcctgcttacacacctctcggttcttcttatctcttctgagaccttacccttgcatttactgaaaacaaatagaaaattaaagtaaattctagagtcattttctggatgcctaaactcacaattgttaccacgttgtcagatttgcgttcatctttctcttttttattttaaatgtttatggatacataatgttgcgcatattaatggggtacatgtgatattttgatacaggcacacgatgtgtaatgatcaaatctgggtaactggcatatccatcaccttaaacatttatcattttttttgtgttgagaacattccaaatctacttttctagttattttgaaatatgcaatacattattgttaaccacagttgctgtactgtgttactgaacactagatcttattcctcctatctaactatatttttgcacccattaaccaacacctctctgtcctttctttccactacccttgcaagcctatggtaaccaccattctattcgctatcttacagagagagaccccttgtgggccagtctctcagtctgattctttttcatatctttccaaaggcatcacaataatgcattcgtttttgcatagcattccaggaaattgtctatacatatatttatcggtttataccatttattgttgttttaagttacaaaaatgccatcttattggatacatatatgtatctgtagctttctttttatattaaatttatttaaataaaaatatctaaaacatatccaagttgatatttatatatttgtgcatttattatcactacagtagaacttttaaatgtcaggcactgttctcagcactgtattacaaatattaactcaatcctcataataattctacatggtacacaccacttttattcttgttttatagctgaggaagctgagacacaaacagattgagttacttgccaaagctacccatgtagttagtagcagagatgagatttgaactgcaatactgacaccattgtcagactttatgcaaataaccatgttgctatgatacacacatctagtttattccttgttacaaatttatagaattctactgtataaaaatattttattgatatatcgctctaccattcttgattttttactatcacaaaccatgtggcaagaaatatacttctatataggcccttgcatctactgtctagggcttctggaacatgtatatttagatgcaattgctggacatacataatttcaattctagcatggtagttacgatcaaggcttttggattcaggctggcagagtttgaatcccagctccatcacttagctgtgtaactcagacctgttttagtttctcatattttgttatcttttagccattattctatggagtcatttgttcttttaaatgtatttttagagaatttgtgcattctttttgtatgcctttgtctttcatatgttgctaatatattcctctggtcagttgtttgactcttttgtaaagtcagatctgtggatacacagttcccataaaatgaaatgcaccatttttaggagtacagttcaatgggttttttcctttctgttctttttttggtggagggggcaagggcttgctctgttgcccaggctggagtgcagtagtgtgatcatagctcactgtagcctccaactgctgagctcaagtcattctcctgcctcagcctcctgagtggttaggactataagtgcataccacaacccctagctatttttttttcttttttttttgtagaggcagattctcactgtgttgtccagtttagtcttgaattcctggcctcatgcaatcttcctgccttggcttcccagttcaatgagttttgacaaacatatatagttatgtaatcatcaattgattgagatagagtatttccattatttctagaaattctcctgtgctcctttggatcaatctgcttccccaatatctaaatttctgttcctatagtcttattttttgaactgcatgataaaaggaattacacattacgttgccttctgtgtttaacttccttcacagagcataatgcttttgaaattcatccatgttgttgcatattccagtagtttattcccttttattgccaagtggtatttcattgtatgtacgctatacactagaaaatggacatttagatgattttgagtctggagttactgtggataaaactgctataaacattcacatacagataattttgtggacatatgtaatatggtttggctctgtgtgcccattcaaatctcatctctaattataatccccacatgtcaaggaagggacctggtgggaggtgattggatcatgaggacggtttccgccatgctgttctgatgatagtgagggatttctcatgagatctgatggttttaaaagtcccagtttctgcctgtgtatactctctttctctcctgccaccatgtaacatgtgccttgcttccccttcaccttccaccatgatgtaaatttcctggtgcctctccaaccatgaggaactatgagtcaattaaaccatttttctttataaattacccagtcctaggtagtatcttcatagcagtgtgataacagactaatacagagaattggtaccagcagagttgggtactgctataaagataaactgaaaatgtggaagcgacattggaactggtaacaggaggaggttggaacagtttggagggcttagaagaagacgggaagatgtgggaaagtttggaacttcctagagacttgttgaatggttttgaccaaaatgctgatagtgatatgaacaacgaagtccatgctgaggtggtctcagatggagatgaggaacttatagggaactggagcaaagtcactcttgctatgctttagcaaagaaactagtggcatttttcccctgctttagagacctgtgaaactttgaacttgagagagatgatttaaggtatccggtggaagaaattgctaagcagcagaacattcaacatgtgacctggcttattctgaaagcattcagttatgtgtgttcacaaagagatgctttgaaattggaacttattttaaaaaggaagcagagcataaaagtttggaaaatttgcagcctgaccatgtgatagaaaaggaatacccattttctgcagaggaattcaagctggctgcagaaatttgcataagcaacgaggagctgaatgtcaatagccaagacaatggggaaaatgtctcaggggcatgtcagagacatttacaggagccattgtcatcaccggcctggaggcctgggagggaaaaatggcttcatacattaggatcagggcttggctgctctgtgcagcttcaggacttgatgccttgtgtcccagaagctccagctccagccatggctgataggggccagggtatagctacagctgttgcttcagagggtgcaagtcccaagcattggtggcttgcaagtggtattgggcctgcagatgtgcagaaaacaagagttgaggtttgggaacctctgtctaaatttcagaggatatatgtaaatgcttggaagtccagacaatagtctgctgcaggggcagagccctcatggagaacctctgctagggcagtgcagaagggaactgtggggtgtgagctcccacacagagtccccactggggcactgtctggtggagccatgagaaggccaccatcctccagaccccagaaatgtagatccaccaacagcttgcattgtgtgtgtggaaaagccacagacactcaatgccagcctgtgaaagtagccatgaggactataacctgcagagccacaggagagaagctgcccaaggcattaggagcccaccccttgcatcagcgtgtcctggatgtgggacatgaattcaaaggaaattattttggagctttaatatttaatggctgtgctacatggggcctgtatcctttttgttctggccaatttctccctcttggaatgtgaacatttacccaatgcctgtacccccattgtatcttggaagtaactaacttgtttttgatttacaggctcataggcagaaaaggacttgccttatctcagatgagactttgaacttggactttggggttaattctggaataagttaagactttgtgtgactgttaggaaggcatgattggttttgaaatgtgagaaggacatgagatttgggaggtgccaagggcagaatgatatggtttggccctgtggccccacctaaatctcatcttgaattataatccccacatgttgaggaaggggcctggtggggggtgattggatcatggggggtggtttctaccatgctgatcttgtgatagtgaggaacttctcatgagatctgatggttttgcaagtagtaggttcccttgtgtgctctctctctctcctgccgccatgtaagatgtgccttgcttcccttttaccttctgctatgattgtaagtttcctgaggcctcttcagccatgcaaaactgagtcaattaaatcttttttctttataaattacccaatctcaggtagtatctttaaggcagtatgaaaacagactaatacaatatgttttcaattttcttaggtaaatacctatgcatgggattactggtttatatggtaaccacatgtttaacattataaaaaactgacaaactatattccacagtggctataccattttgcattccaatagcaatgtatgaaaatctcacttgtttcacagtctcaaccgcactgtatgtattatccttattattttgtctattctagttggcatgtaatggtgtcccattgtggtttcaatttgcatttctctaatgaataataatattgaacatttcctcatgtgctttttgcctcccatacttctcctttagaggtgtctgttcaaatcttttgaacattttctatgtgtgttatctcattataattatattcttactgtttttttacacagaagactaagattcaaatcctctatcaaagtatatgtttttacaatattttcttccagtctgtgacttttaatttcattttcttattaaagtctttgaaaacagatgtttctagtttgatgaagactaatttagctaaaaatctcttggtatatcgtgcatcagggtgacctggatgtgagacatggaatcaaaggagatcattttggagctttaagatttgactgcccagctggatttcagacttgcatagggcctatagcttctttgttttggacaatttctaccatttggaaaagttgtatttactcaatgtttgtacccccattgtatctaggaagtaactaacttgcttttgattttacaggctcataggcataagggacttgcattgtctcagatgagacttcggactgtggacttttgagttgatgctgaaatgagttaagactttggggaactgttgggaaggcatgattggttttgaaatgtgaggacatgagatttgggaggggccggggtgaaataatacggtttggctgtgttttcaccaaaatatcatctggaattgtagctcccatagttcctatgtattgtgaaagggacccagtgagagataattgaatcatcggggtggtttcccccatactgttctcacagtagtgagtaagtgtcaggagatctgatggttttataaggggttttcctttttacttgtctctcattctgtcttgcctgcctccatttaaaacatgcctttcgccctccatcgtgattgtgaggacccccacccacttggaactgggagtccattaaacctctttttctttataaatgacccaatcttgggtatgtcattatcagaagcatgaaaacagtctaatacaccatcttatcttggaattttcattgttagaatttttttactcttaatttaatttattttgtagatccagggctagtcaggctgtctaggtatttttgagtgagctctcttagtttgtgcctgttaagaaattttttcatttaatctgtggtattgctgtaagtgatctcagggtccagcaacaatggttatatcaatctgcttgatctgcagacatatcagaaatagtgacaacctgtctttcaaccataggaataacataagccattgctaggggcaccctggccagaaagtaaggcaagttcatttatattgtcttggacataaactgaaccaagaagagatgaaagcaacaatgtcatatttattatttcaccctattttgttttgtttctatgttaataacttctgccacagcactatacttgtccttttgtacagttcatgtgaataaaatattatcatgtatctttattaaaaatatgttaaagaaaccaaacatcttttgaataacatgactcttcacagcctacaattataatacatgctccagttgaacaggtgccctagttctcttctcttcatcattttgcatggacatgcatgaccacttccctacctgacttgatctcagtgtcttgcttggcagtatgttactgaggtgacagaatgtggtgacatgtttttctccttgcacttgtgaagtttgtcacttgagtgctagatggaccacttaactgatgcaggctagtagacgtcctcaatctttgtcagtttgcttttcagtttataaacactacagattcttctaagaagattgagaaatattcaatttctcttttgttttcaaaacttagtattcaaatctccatcttgaaaattgtcaaagacgcacgtaatctagcaaaaaagaaaaatttatagggctagagagggagtcagtaacagagttactgtgttccttgctttttgcttgtgtgttcattctaattcagcactatagcataacagaaacaaagtctcattgggaactgagcaaagcacagacatatttaacataagacataagaataaggtgttactaaacctaccaagtaaatagtgtgagaaaccactgattgtaatgttttatctcttacattaatagagatgagttttcatgtcttagaatggaaacaacactgaattacagcaagttattttagctcttacatatgccagaggcaggactggatggctgctgtaggtcctaacaattgcagaattctgtgacttgaaggtgaaaatcaagttcttataattcagtttccacaatgagtttccatatgactacattgttgtttagttttgttttttgctaggtagtcctacactgtaaagttgcagtgagattcaagaagcacgtgatcaattggttagacagatattgatagttaataatgaaaatgtcagctatttcttgaagagagttttagtcagggtcctccaaagaaacagaaccaatagggtgtgtatgtgagtgtgtgggggtgtgtgtgtgtgtgtgtaatatgtgtgtttgtgtatgaagaaagagaaatatttattttaaggaatttgttcatgcaactgtgggggctgacaaccctaaaatctgcaaattaggccagcaggctagagattcaggtaagagttagtaagagttgatgatgcagtcttgagtctgaattcacagtgctgtaagcgggaaactcaggcagtttctatgttgcagtcttgagaatcccttctttctcaggaaacctcagtctttattcttagggccttcaacaaatatgaggaggtatacccctattatttatgaagggctatctgctttcctcaaagtttactattttaaatgttagtcatatgtaaaaaatgcctttacaacaacatctacactggcatttgacaaactactggctaccatagccttgccaagctgacacgctaaaggtaactattgtgagtggttattcattaaggctttaatcagtgtcatcaaatcaggcattaaagtattagcaaacagttatttcatcagaaagatgattatttgtcattctagtatttactctttttgctgatttatcatgtcttcattttgtttcaataatgttaataatgtagaacttgtacattaaaatatgtagatattttaatatcattcatccaagattaagctatatttaaaatcacaagctttaatatatcgacagcactaaaaagggacaaaaataagaaactcttaattcatgtctttgaaaaggtaaaacaccatctgagaaagacattagtcttatttatatggattagaaaaaaatattagaaaatatatacaaaacagtgctattaaatgtaagctaagtcacgaaatactctatacctcatcatagtggtgaggctctgtctaaattcatttaccaaaaagtgcaaattgattttctataattttgatatatttactataatagttttgagaactctttactttggaacatgtggctataatccatgttatagaaaaccacatttgttaagatgtatttgttcacttaaagcttttgtgaatggtgctatagtatatgaatttaattcactgtacttgtgaacattaatatcttgactatgatgacactgaactaacaaaagttaactcattctagtggtgtgaaactccagaggttctttagagctagaaacatacctaaaagcattcctagttctttttttaaaaaaaaatcatgtaaaatggattagagggcctaatgcttaatttaggaacacaatgaggaatctcaattataaaaaataatagtagataacatttaaaaacattttatgcgcatttaaagcatttagccaggcattgtgctaagcattattcatggcacataagttatagtatttaactcatagtaaatctgtaataatttgtatatccttcttacagatgagctacaatagcagaaatgatgtagtgtgatagttttacttgagtctctactcttaacctttgcatgtactgcctcagtaatacaaaagatgggagatgatggttgggtggatggagaatgaaggattgaaggcagcagggtaaagaataaagaaatattagatgagcaaagtgggaaatactaaaatatttcggggttaaatcatgtttaagatctgttttggctccagtttttcaattatggtgaaaataaattttaattatattgatatctaagcatgatttatccaatacctgagatctactacagctttatgccaccaccctagacttcaaggatacaaaaaatattctatgtccccttaaggaaatgacaaaaacacttccaccctgatatcttaaccttttagtatctcaattcaactgaactccaaagagctgaacttgaaaatccacctcaaaacatgcttcctcccatgaagctttttctaccttttctctaacaaatcccactggttcaaatatatttgtcaatttcatcacacattcctgaaagttgacccttcatattatttcatgttaatttctagtttggatgccataggaaggtagacatgaaaataaaaactctaaaaagacaagaccaggactatgaaaaatcagaaagtaagctcatagaggagaaatcacagacatgacactaagaagttgaggaagtttagtccaagaaagcttcctggatacagagagatcaaaacaaagggatatagagcaacgtggcagctagatggaagggttggaaagtagcagaaccaacatgtgtccaaaggccctagcaggaattgtacatatgtagcctcatttaagtctccaaagaaatatgtgttattaccattcacattttctagatgttgaaacagagaccaacaaatcttaataacataaggtcacctctcataaatgatagaattatgctcaagtttaggtttgtcttactgcagatttcattcatttcattcattcacttattctatttatttcatttactcttctaagtatgagatttttaaacagaataggtattattcatttcgatcagatgagttgatatataaatgcataaataaaggaaaaaatgaagtttatgagttcacagcagtctaagttattaatataaaatcctctctcaaattatcctaaattctgactcttctaggagcctgaaatatatttcaagatggcaagaactgtattctaactttaggttgaatttggattctgcttatttgagataacacttaggtctcaagtggaacagctagcacagtagaaagaacttttctcaacacatttcttaagttatactctttgatttatcacacaagggatggggaaaagctaatcactattcagacttaaaaaatatatttttgtggctccacgtttggatagagaccaagagaagaaaataaattaagtaggagagctaattaagaatgtagctattgcagtgatttcaatatctgggcacttgcctttaatagtctccagaagtgctataccttacagttaaatggccttcccaagcaggaccagtggattttcatgccagaggaaacttactagaagcatacaagacacacaaaaataagtgaaaacaaaaacccaatttctatgttaacttaagaggatgattttaaagtagttggaatatttctgttttggggagacacattggaaaagagaggatctagaaaatatgaaacataaactgtattctaagaaaggaagaggcagagagaggaaagaggagaggaagggagaaaatgaaagggggagaagagagataatttcaggagtaacaacttgcagatttctagctgtagcataggtcactactatattaaaaagcttcagctaagttcttgaagatggcttttgaagacctcatttttggaaatgaataggcagttcatgagttagaaaatctagaatctctttagtaataaagttatgaaaaaatttatgagattctagaaaggcaacatgctgctctttagacctgtgtccacaaattgattgggaataaagtgaactgacttctcctggaggagcaattatgagtgtgacagaaacccagcccataatctgggtcaagggaggtccctcatccacagaggctgaaaactgcagagtccacagccccatgctcaaagccctgtcctctggacaggctgatgaaagggtgtccataagagggcacaggatggctgctaggttctttgctggccaggagaaacatggtagacattgggtgaaggaggtccctgtggccactcaatacctgggatgggaggaactcactttgacagatggcgggtatattagtctgcttgggctgccattacaaagtaccacaaattgagtgacttagtaggaatgtgttgtcttacagtcctggaggctggaaggctgagatgaaggtattggcaggtgagtccttctgaggggtgtgaggaaagcatctgttctaggcctctttctaggatacttctccccagatggccatctccctaaatggtcctgaatggttttctccctgtgtctcttcacgttatcttccctctgtgtgggactgtctctgtgtctgtatttcccctttttatgtggacactagtcatacgaatgaaatgggcccactttcacttgcctgtctctataaaggctctatcaccaaataaggttatgttctgaggtgcagggggttagcactttaaaatacaaatctcatgggaggacaaaattcaactcatataacaggagacaggccatcgctaaaagttaaaaaaaaaatgcatactatagaatttcaattagatattgtttcctgactgcagttttccttgtatttaataaggaattctaacaaattttctcccaaggaatgttatatacccttgaccactggtatcgggagaaaacatcctggtattcagagagtactttgcagtttcattaattagttgtctaattaaaataacattgatttgcctctgcagatatggctgaatgtgttttattcatgtacttaagagaaacagatcattcatttcttattttaaggatgaaggtggctatttccatggccaaaaatcaccatgcaacctggcagggtcccctgccacctcccatttcctgccatctcatggtgaccagatgccatgccctttatgtctgttttctaaggaatcagacagcaaaatctcatagttcatcaaatgataatcatatattttctgttgtcaacaagtaaaagtaataaagttcatgctaaaaatacctgtattcatctttttaataaacattactgaaagtccattgccagtcaataattgaggaatagacattgttcctatcttccaggttcttccggtctggtaaattaagatggggtatcgtacaaagctagggtgtcctaaggtaacaacagactaatagctctggaggccagatatgtatgtatggttattaaaaagttttattagggccattgttgcaagtcatcttggaattgtttgccatttgagaacattcaattaaaaaggcattataatgctgagattttaaaatgtaaattagaatctggaaagttttcaatgatttctagtctaaaattaaataaagcaccaaaaaaacgaattaaatttagaacattttaagagaaatgaataaaaatactcaactacttttggaaacaaacgtagaggagagtcaactttattcaaccaataaatagaaaagcaatgctatttaattgatggaacaaaaaaaaaaacacttcctcagtttgaaattattcccagtttagaagccaaaccaagaaaaggagtgcttaaaataagtataaagaaaggaaaaacatacagaacggaacagagataaagcaaaaaaaaaaaaaaaaaaagattaaaaaaaagacaaattagagaagaagggtaaatgaagaagaaacacaccatagggacatgaaactaaatcgtaaagttaggaggttgttgatcactgatttatgaaaagctgactggttccatgaagatttaaaatagtgctctcaatattgtgttgcaggtgctatggttttattttgaaataagtatagtgtttgaaattccaaatttctcatttaatcctgaacattttgctattatgccaaagaatgacttgaagcacaaaaacgtatttaaaactatttccagcagtggttctcaaatctgatacctcagcatcacctggcaagggtttgctttgttatttcagcagagatttactaaccagctggcagtactctggatatttatgtttcagtatctctatttatctatttatattatcccagttcattctcacaatcacacaatgagcaaagcgaggcagtgctgaaaagggcagcatcagagtttgcccgcaaagtgttctgacagcaaaatgcatgctgagcttctacatttcattgtcccacaattgcaatggcaggcccccaccctagaactaccctctgggctggtgggattctgacatctacattttgaacagcatttcttaaaatcatcaaggttgaagattctaagtggtcaaatacactgcattccacaatgacctgagattaccttctttgtcccttgatttaaatcccaagtctttaaaaataaatcaaatcctggaatgagggtaggtgaaaaagttaatatcaaggaaaataatgaaaaagaaagaaggaactctgtgtataacacttccccaggaataagtagtctcaactacatcctaaagctctttaaccaccttcatgaaagcctcaatccacttggaatgggacagaaattgcaaaggaatactctctgggcaccagcaatattgccacaaccaaatcttaacatcataggatttcagcactgaaatggaaagtgaacaaagaaaggtaagcagtttacagtactagtaaggaagaaaagcaaaaggtttttcaaacattggggctctctccagttgttaccaagagatactgggatattttacctctaccatgtctgtgcctctaatcatccacccaccacagagctcagccaaccaagaagggctaagggtcctgtctaggactcttcacttgattttactttcttttctttcaagagtgcacaagccaggcacggcgcaatggctcatgtctataatcccagcactttggtaggccaaggcaggtggatcatctgaggtcaggaatttgagaccagcctggtcaacatggtgaaaccctgtctctcctaaaaatacaaaaattagccaggtatggtggcgggaacctgtaatcccagctactagggaggctgaagcaggagaattgcttgaacccgggaggcaggggttgtgtgagccaagatcgcagcattgcactccagcctgggcaacaggagtgaaactacatctcaaaaaaaaaaaaaaaaaaaaagaagtgcgcaatcctagtacacagaggaacctcaaatatcctctacttctagcgctctgaaaatacagaaacaccttgcaataaactcccccttttgcttccttttttcctactctcctatccacatcttccttgtccatatctgtttgtttgtttgttttcccttcaggaataaagggagttcatgaacagaaatctcacccaatcctatgataccttccagaggttagatgaagaaatgctgagtaaatatggagttcccttctgtatgctgttttgtcatttcttcgatctccagcaaagactttaaacagaaggaaaggagggagacagtggtgacatccaaaataaggttgaggccagacttcttcaaagtgatatgggaagggggcagggaagtgctgggtagggcctgtgccctcagaccaaagtgaggacaggcactcctgttttcatgcccaaatgttgcattttccaagaccaccctggctcacaatgtccccatcctctgcctataaaaaccccgagaacctagtgggcaaatacacaggcggctggacgtcaagcggaacacaccagcagaacacactgacaaatgctggcaggccatcagctgtggaacaccaagggaaatttggctgagggttgtcagaggagagccaagcctctgagccacccgactccagggcaaaaccaccttcccactccatcccccttctagctccccacccatctgttgagagctgcttacaccattcaataaaaccttgcactaatcctccaagcccacatgtgatctgatttttctggtacactaggacaagaaccctaagatacagaaagtcttttgtccttgtgataaggcagagggtctaattgagctgattaacacaagccagctgcagatagctaagctgaaagagttgactataacatatgcccactggggctttgggagctgtaaacactcaaccctagatgctgccatggggtccaagcccacactccccatgacctgctggtctgcatgctccctgctaggggtttgagctgtggggcacagaagaagcgagccacaccctattacatgccctgcgaggggcataaaggaactttcctcatttcaaaaatggcagagaaggaagggtgctcacacacatgtcttctagcatgttctcttttccccttatctcgcttttttccactaggctaggatttgattccagctagataaaggccagcccatggtttgtatctgatccactgttgaggcttcctacttctgagtgaaaaagcttccaaatctattaatagatatagccaactttcactcagctgccaaatcaaagaatgaacaaaggcaaaatagttaccatttagataggcttctgagacgcttgatttcatataagacatctgcatgcctaacttcccttttcattctatcaacgtctatctatggagtgcctactatatgctagggactgtttctgtgctacaggcatattcatcatgccattcatttgatttctaactgaaggccctttttcttctgcctcccaatttcagctgtcatcacctgtcaaaatcactatttgctctggtatttatggtgaaaggagtcattactagtcatcatgagaccatctgtacaatgtcactgggtagtgacatggcctctgttcagactctaagatgttccatcttgcaggatggatattaatgccactaaatccatcttcagcattcttgaatgagagcatttgcaatagctattacatctttgcaatagcatgaagacagaagacagcatattattatcaaagactgcacattacaatcaaattataatactacaagcagaaaatagattacctttcctctatttttaatgtactttataaacttggacagacaagccgtgtccagagggggttatggtggtcaggcatgtagcatgatttcacagggctatgaggatctcctgtgggctcctggctagatgttaaccttttaatttaagggagtaacttccaaaaatggtggtacatgagaaccacgaatgaggcagccttaggaggaatttaatcatctgtttttttatttaagtaattaattattttttggtttatttgtatgtcctaaaatgacccattgttcattctgttgcatattcagaagttagacaacactgatttaagcatttgcccagcatataaaaaccaactcaaattctgctggcttataaagtatttgaagtcagaggagatcatttcaagccactacatgatgtaggcagctcataaatataagtgaggtggttcagtggatttgtgatttgtttgatgattgatgcttcatattctaatccatcatcacagacatgatgtattttcttattaaacatgaaagaatatttgtcaagtgcacgagaatatagttttcagaaattttcttgaaacccaaagcttcttaattcatctcacattctctcacttatgatagagacattaaccaacacaacaaaataatagtgcaggcttgatgcgtagtcacaactgaaatttggctgtagagctgggagacaagaggggtggttagagttgtggggatgataagaagcatgtcccacatccgtggagcaactcttcttcagttccagccaactgtgagtgagaaaacccaggatcaccagactttcagaatttttaaaaaagaaatcacaaatccaaatttttgtgaatttttgattgttgaatattagcaactaatttatagttgaataaaatgcccgggggggcctgcacttgtgagatgaatgaacctatgtgggctggatttgacagaggacctgtgagtttatggtctattatttcaactggtaccattcaccagcccattagtgcagggaaggcaggatatgcatggggaggagaagggcactattgcaaagcggggagggaagtcataagggtaagccctgataaacacatttgctgactttgttaatttgattatttccagttaacaaaaagttacccttagttgtgataggatggttatcttcaaaaagttccttggaaaatgaggatttgagaaagaaatggtcttcacagcatcttgtgggctaggacttttctcgcagctgccaagagcctatagacagaaatttagatatttagaagatcacaagataaagttgttaaaagtagctgtttgatgtggaggaagcttctttgtcatttttttttttttacttatgcaagttttatctagtgagttctaaagaaaattccaattaaacatacatttacattaagaaaaagttgatactttcagtatctgttgtataattacctttttattaaatagatttgcaattccatgacattagccatggctttatacttcttgagcccctgacatcacatatttggactttggcatatattctgtcagggaatttgtcttgaatttttagaaaacatatatccaaagaacataataaagctatcagacattttcttattttgttttctgttttgatttgggattaaacagcagcaaagacaagaaaaacaccaacaacacatacagcaaagtaattactaaaagtgaggctggagctccagagagacacattgtcctgacaggtgtccgagggagacctggtgttccatgtaagtccctgatgtcttagagagactgtcatgagcacatgctcagacatcttgggcagggcatgttaggcagaggcagagacagatgtaacctaatgaagggtaagcttgagggtacttctcttgcctgacattttccaaagctctgttatcactcctggggagactgggaggaacccgctgctccagctatgctgctgtggcctaggagtccctcgtggcatcctcaggctgtgggtgtatccggagagctgcctgcactacttctaatatatctagtccccagggtcaaccttataaaccttagaaagttttccttttttttttttttttttttttttgaaacagagtctcactctgtcgcccaggctggagtgcagtggcgccatctcggctcactgcaagctctgtctccggggttcacgccattctccagcctcagcctcccgagtagctgggactacaggcgcccgccaccacatccagctaattttttgtatttttagtaaagacagggtttcaccgtgttagccaggatggtctctatctcctgacattgtgatccgcccgcctcggcctcccaaagtgttgggattacaggcgtgagccacagcccccggcccatagttttccttttaagaagaaggattggaacgaggatactgctctgccacaaactagaagacccctacaaccctggatccacagctgtttgcagccgatcctcatgcaaattgccaacagatacaggtgggaggtgaaccagggacatctggacaagaggcgcacaatctcaggcttgaagcactgctgaaatgaaatgacagagggtgttacagctgtggcgttgctcacaacaaatggcaatgttaaaaaaaaaaaacttttctgtgtcataaaaaataattcaagtatttttgatgtactatttctaaaagaaacaccaagttttacttccatttgttctacagaaaatcatgtggacaaaaccattgtcatgtgtagagatgatcaaagaccgactatgcaaccaaaaaatgtagaaaaagattatagatgaggatgatgataaaggtatattattgtcttgattttgtgacatcttgggttttgttaactatggaagtttttattctaagttaatatccatgtttatatctattattatattcctaatattgtgtttttaatgaggatctccaaattatacttttcaacaccacaaaacctaaatccacctctttaaagagggctgggacagagtcacgaaaaacatagaagctggtgttaccccgcaaatgctcagaaggcagtcaacattttgaggtgggggtttagaggtgttgtagacaggtaggctccagaacacttacaaatatgaatgcatcatacaaaagtcatcaaataagtttatttgaaagcattttgatttgcttttaggatggagtcctgagcatccttctgctattgtgactactctgacttgtttcctacctcatctcagcagtgtcttctactttcctttttttcacatgggtccttattgttgtatttgtatttatttattttttgcttttgttttgatttcttttttctaaatactaattttttaaaaaaatttgttcaagatgatatctatgtctagttatctctcaattcctttggcttacttttatataggccctcgagactggacttacaagcactgattatagtaaataacagatggcaaactattttggagagtgtgaacaataagatttctgcctctaggccactgacaaaaaaagatgaatacattgctatccccacccaagacagaaagaatttcccagccaaaacaggagcagatgtataaatcatgggcagagaaaataagaggggttttcctggacataatggagtagggactaatcacatactgtcatagcatttgtaacataaatgcatttcattgacgcagagctgtaaaaacaaaaggagttcttccataaatataagatgaagggtgttagttaactgcaatgacaaagaagattactaagttgcttatatgaaatgtgggagcttaaatgtgtgaaggatgaccctgtaaggtgccacacccacggctgaacgtatataaatggtcctgtccagatgtggcatgcaaactcagaatcttctcagtgtaactcagctgaactcacatctcccatcaacatgtcctacaactgctgctctggaaacttctcctcccgctcctgtggtggctacctgcactacccagcctcctcctgtggcttttcctaccccagcaaccaggtctacagcactgacctctgctctcccagcacgtgccagctgggttcctctctctataggggctgtcagcagacctgctgggagcccaccagctgccagacatcctatgtggagtccagcccctgccagacctcctgctaccgtcccagaacctccttgctctgcagtccctgccagacaacttactctgggtctctaggctttggatccagcagctgccgctccctgggctatggatcgaggagctgctactcagtgggctgtgggtccagtggcttcagatccctgggttatggaggctgtggcttcccttccctgggctatggcgttggattctgccgcccaacctacttggcttctaggagctgccagtcttcttgctacagaccaacttgtggatcaggcttctactattgatcatcttgttaaattgctgattttgttggctaatgccttcaatgcctctactcataacctttattgtcttcatcatgtacagaaagaattagcctcttattctataattatcaagttctcagtttgtctttgtccccaaatactggctggcaggcttcatctgaaaaactgtaattggagaactagctcaaaataaatcttgaaatacacattaaaagtagaatttatattattcgattttcttccacaattgtataaaaagtcaaatcattttaatccaataaatccattggtctcatattcagctatgtttgtggtggttttatattgctagggttttggttgtgatgtattaggcaattattatgaaacaattggtgtatatatataggaataggtttcaaaatcatatgaagtttgcgattcagacaaacttttgggggcctcagagatttttgttattcaaactacaggtagtggaagtctactaaatttacagacttttattcattaaaatatcagaatcaggaattagcttgatccccttataaaatgtggattcttgtgtctatgccaacaagcataaggtagcaaactagttgatagttatatcaggaatctgcagagaaaaaaatactatttagaacaatatggttatagatatacataaaagaaaaatggaattgaagagaaacaaaagtgatttgaagtaacttttgaagtcacccaatatttgttggtaatcatgatcaaatgcctgcatctcattgatgagaattcaatatgattcagttatctacatatgtgtaataagggataccatgaaacttgaatggaggattgatattccaccttggtttgtattcatgtttcacactaagtaaagctgaagataataaccttttgatatcatcagaagtgataatttaattcacatctgagcataaaattagggaaatgttatttctcttttttgtggtagcattctttgttttctcaggcaaagcagttccagaaacaggtgtgaagataaatagatttcaataaggaacctaaagttgagaagaaaaaaagagctcaaacaacgttcaataactattcccatgcattattcctttagacaacagctgttagagaaagagatccattatacatgtaaatgatgttaaatgtaaaaatatggagacacaaagatgataaggaatgtacagggaaacttattgtacgatatcttgaaggagctgcaaatttttgacttgcaaagacagaaatatcggaggggagaagtctgggaagattacacgcaataagcaaagcagaaggggctgaaagtctttgtgtattcaaggaattattggaaatttagctcagttacaatgcaaagtgatttaatatggtgtggtaatgacaaacatgttcattcaaactactaacacagtcttgagatagggcactttttttttttttttttttttttttttttgggacagagtcttgctctgtcacccaggctggagtgcagtggcgcaatctctgctcactgcaacctctgcctcctgggttcaagcgagtttcatgcttcagtctccctagtagccgggattacaggtgcccaccaccacgcctggctaatttttttgtacttttagtagagacggggttttgccatgttggccagagtggtctccaactcctgacctcaggtgatccgctcgcctcggcctcccaaagtgctgagattacaggcatgagccccacacccggccgagattgggcacttttattccattttctcttctattctaatcacttatgtacttttaaaaagaaatcttttatccaatgattaggtataaattattaggttcatacctaaggttaaataagttaaaatcaaatgcttacaaatgaaaaaacaatttataattaatgtcttttgtttagaaaatctagacaaggaaaatacatgtgaaaatattcagaaattatgagtgtcaacatctaagaaaggtcttgatatataaacatacatgtgaaaatatttagaaattaccagggccaaaatctaagaaaggtgttgataaataaacaagcagaaagccatggaattcatgactacttttagaataggaatgttgtcaaatccaaaagagaggctgaagttcagctccaaatcatttcagtgcttaagttaagaggatataggaataccagggttcttgttctatccttccaaaatcaaatttaaattcttccaggaggaggataacatcacagtgagctctaaattatttctttatatagataaatttagatacaaatgtaaatatagatacctatttatatatagatatagataccattgcagatatagttatatctagatacacatgaagacgcagatatagtctagtacccaacaaaaatttaccaggcttcagaagttaagaaattattaaatccaaaatatagatatatgtagcagaattaggcttacaagagcttcagtaaatgaaaatattagacataaatgttaaataactacacttgacatgcttagggaataaaaagatagatgaaaaattttggcagagtactgaagtatattaaaagaaccaaaaacagattttaaaattaaaaaatgtgataaattaaaatattgaattggtgaacggattaaaacaaaattaaacatggctaaagagataattagttattgttcactagaatatatacaaacaaaaaaaataaagaaaaattattaaaatatttaaaggagtttcagagactatggaacatgtgaaacagtctaacatagttgctgctagagtcctaaaacaaaattatgtgtctctctgtgtgtgtgtgtgtgtgtacatatggctagaaataagtccacatatcactaaatctaagagaagtcatatgtaataaaaacagattcacaggggatccaaagataatttttgaatagaggaaatatcaaatccatatattcaagaactactaaaaatcccatgcatgataaatatgaagacaagcccataactaggcatattggaatctcactgaggaacaggaaagaaaaagagaaaaacttaaagcagccagaggtgggaaaaaaatttaaaaagaaatttaccttcatcaaagcaactgggattaaaagctaaattttaaacagaaaagaaaaaatataagaaaacaaatacatgtcctcaaatattaaaaaaattcaaaagtagagtaatatgaccaataaatgtctgttttaaaaatggaagagaaatggaggatgtacaaaagcaccttttatgtttaggcaatgtttggacagttaatttacaataaacagagaataactagggctagacctttataatggttattcattactccatcattttgaaactcatcattttgagtgtttagtgacaataatcctaggtttcacctccacttattcattttactggaacaaatttatgattgataattctctttccaggttttctgcttattctaagtaattttgcatatataataaaataaacctttttacccatcactattatataccgaaatttaatatgatattatttagataatataacttttggcagcagcaaatcttggtagctcaaatcaaccctatcaataagatccctagtaaaactgaataaaacaatcctcatataaactctagagcacactcaggctaagaactgctggaacaaaattaggagatggtttaaatcaaaggaagtgttgacagttaagctgctttcttcccagaattgttcattgatttaaaaaaaaaaggatattaatgggctcatggcttgaatgaccacaagcaatcagactacaggaccttctaaggacctgggaacacacgtgaacatgctaagtttttggtaaggatcttaaatagtctatcagaatttttaagagcaagcatatatagaatatgtttcatagaaactgaagccaacctttgaactgcattgatcttggtgatatgggagtgttagtaacattatcccagcatgctatatccaaagtaaatttgtctgcaaataaaaccactcaaactctcaaattgcctatggtaattaattaaaaatgaccaattctataaaaaagcaagatatgaccaagccaagagacaatacagagtgcaaataaatccacaagagatgaaggtattagaatatacagaaaaacaattgtggttattattgttcttaaaaaatttaagacaaatttaagaattttgacagaataccattatctatataactaaacacaaaaatattaaaaatataaaatacaataattagaatgaacaaatctaaaacaattccaatggcaaactaaaatactaaacactctgaaactatagaccaacctccccactagatgaaatatagactataataaagagcactgatcagagagtggcaggatctggttgcagtttagacaaattggaagtggaatcaagctgattgaatttggtaacggtgcttgtttaactcaattaattgaggaattttactgagaagctctttacctttctaaaatgcacaaggaagggattatattctctggaaaatgataaaaatatttgcagatgtatatttgtgtgtatgtatgcatgcacacacaaatgtatgggtgtataaatagtaatatttatatgccacaagccacagcttttctatgcctataatgcaataaaacattacaagatacttgaaaaggcatgtaaatgttagccaaaggaaaacatttaatagaagaaaattcacatttaataaaaacactagaattaccaagcattgactgtaaaatgactatgatatttgaatgatttaagaaaatattaagataattgataaactttaagatatgaaaataataaaaagtaatccaatgaatatccccaaacagaaagataaaagttttaaataaaatgtatcggatagaatgaagaaaatatttgacaagacagtaacaaagataaataaacttgaaaataaattttttagaaaagattatctaagtacacaaagaaattgagaatgaaaaatgagacagagtaagttattaaagacttgctgaaaaacattaagcaatttaaaaattatgtaacagaagtcccagcagaagtgggccagaaaaaagcatagaaaagctattagtcaaaatgttgcgtttttgacaaaaataccacaacagcgagcaagcaacaacaacaaaaatcccttcaacccccagatccaaggatcttgggattttgaaatcagaataaagataaagaaattcagacttaggcatacaataattaattcatgaaaatgaaataaagagaagttcttaaaagtagccagaattttataaactacacattttttagagaaatagcaataagaattatagctaatttacagcataaatattgaaagttagaaaaaaatggaatgatagctttgaaaggctgaaaaagaaaaataatcaacctagaatttgatgacagttaaatatatccttcaaaaatgaaggaaaaaaacccataaattttaaatctgcacaaattattgataaaataagtaatttgaccaaggctgattggtaataaattgatcagcaatttttagaagaagtgggtaaagctgcaaaaataagttgtatagtctctggacagcacccctcagatctgaaataattcaatctacacatcagggatgcaaatccacaaaccagaaaatggcaagccaatattttcacaatgaaaagcacacaaattttgaaattttctattttcacaatgttgacaaataattcatcttttatgcttaaatgaaaaatcaaactacccctggatgcctacactgtacagaccttaccaatagaatcttggggctggattaaccaggatctggttgcatatcaagtctctattctcatacccccacatcattcacacaataatacaagtgtagaaatagagattagaataaaatgaaacagatgtgtctacaagcctctttgattggtgcagagaacatgaactagaattctataatttttcagaacaaattggttaactttctactcttagctaagagtagttttgctctctattcatcatgtggctaccctaatgttttgccatgaagactattttgaagaagtgtttcaaaaacagaaagaatggagaaggctaagacatttaaccttactgaaggaaatggaggagaaattaattctgctttggaatataaaaacaaaatttttttttcagataattatataaattttgtgcagttactgactccttttttctctatgcttcttttaaaattgaactacttgattttattgatcttcacaaaacctaaatttgactctgttgattttctgttttatgtttgacttctatttaattggcttctgttcttgccgtcataattttccacctttataatttcagacatttcttttggcttaaattgctatttttttttcctagcatcctcaaataaagtactgaaaatttgatttcaagctttttaatattctcattaaaatctaaaattttccttctaaacagttaaatctctcaaattttactgcattttatcatcagtatcatgtatttcaaaatattgtctaatttccattgtggtatttctttctttaacgtttgaattattacaaatggcattgattaatttacaattgtatgagattttttaagttaaacaccagaaattaatttgtcttacatctgcttatattttaccctttaaaaagtgtattgccagtgctcaactgaataatagctcacatttaaagtctgatgccagcacctgtgatagatttcattttaacaaattttcttttcaaaataaaatttgcatgatttaagggtaataaactttttaaccctggaataatgtggtggcttgttatctattcattttctaatgttattttcttgtgtatttgtgttattaaaattaaagatctatagttctctgtgaatgagctttgtatacaaagccttaaccgatatcctcagagtttttaactctcttaaagtaataatttcccagtagttcagaatttgacagtgaagcattctctgactaaacacctcaggagcagagaagagcttaattcactccatgaaccattgcccatgtgttgctgctaacaggaggagggaacaaagaagctgtacaagcaccaggaatacatagagcagggtgacacttcaggcttatatgacatggctcacattaagcaaaacaaacagagaactcatgtttgtaaaattgagaaaagattgcttatgagcttttttcgttttctttttctttttttttgagatggagttttgttcttgttgcgcaggctggagtgcaatggcgcgatctaagcttaccgcaacctctgcctactgggttcaagcgattctcctgccttagcctctcgtgtagctgggattacaggcgtgcaccaccacgccgggctaattttgtatttttagtagagatggggtttcaccacgttggccaggttggtttcaaatgcctgacctcaggtgatctgcccacctccgcctcccaaagtgcagggattacaggagtgagctactgtgcccagctgcctatgagcttttagtaaatatctttgaattcaccccattttgggtgcaaagttgcctgaatccctgcattcaccaactggcttccagactgatttatttctctgagtgtgtgtaagtagattataactgaacctatgggggaaaggatatagacgtggaagctgtgggttccatgttagtgctttcccatggctcaaactcagtgtagctggaaataaccttctgtagcagccaatatggctattttagttatatctcacaaacaaggatgctatttgattttcttttaatggttactttctaagttttcatgaatgtagtatttcacaaaataataagttgtcaaaaatatgactggttgtaaatgagctaaaattaaaagcaaaatgacacctttgtgtagagctgaccaatctttaaataaattttctatgcatcatctccttacaccctcaagcagacctgtgagagaattcactcatagtctaaggttcttttgcatatgagaaaatacagtctctaagagaatcatagacttgacaaaagtgccattcctttaaaaaatgagaatgtttcactctttctggtaagaaactgtgtagatcaccaaattaaatttaatgtattaaggtggcacttgagctctaaaagagtcagtatcttttttttttttttttttttggacagggtctcactctattgcccaggctggagtgcagtgatttgatcacagttccttgcagccttgaattctgggctcaggtgatcctcctacctcagcctcctgggtaaatgggacaataggcacatgccaccatgcctggtgatatggtttggctgtgtccccacccaaatctcatcttgaattgtagctcccataattcctacatgttgtgggacgggcccagtaggagataatcgaatcatgggggcagtttcccccctactgttctcgtggtagtaaatgagtctcatgagatctgacggttttataaggggaaacccctttcacttggttctcattctcttctgtctgccgccatgtaagatgtgccttttgccttccaccatgattgtgaggcctccccagccacatggaactgtgagtccattaaacctctttttctttataaattacccagtcttgggtatgtctttgtcagcagtatgaaaatgtattaatacaactggcaaattttctgtttatttatttttattatttatttttattttttatttttatttttttgtagagacagggttttgccatgttgcccagactggtctcaaactcctgggctaaaatgatccacctgccttgccctcctaaagtgctgggattacaggcgcgagccaagaggcagtttccaggtcatgcagcaagcagaggatggaaccctgcttcctaagtttcattttaatgcagtttcaattgtgtcctgtggtctcattttccctcccttcatcggccctctttcttattcttctcctccccattatcaccaccatcctcatcaccactagattgcttgggtaataatcatggttagtagacttttactgggaaatccaaagggattgaaataatgagtgaaaatatggaaggttctattcagttttctgtgacagaaattggaatgacaatgttcgatgctccctggtgaacttgatctaattttgtttataactttcataatttaaaaaatgttataattcaagttagctctatatatagaattctcatctgtgagtttctgccatcttagagatctagaacacagacacaaatagcattaacattaaagaatactttctggctaagccaaagccatcttggattaatggaaatgatatgcctattttagatataaaagtggttctctggcctctggaaatactctagttagaaaagcaaactaccttttaaagactaatatgatagtttcaataataattacacaactatatagtgaagcatgcttacacaactggtagttataatgttggagacaataaatttgcaatatcaaaactggtactaaagttaaatagattaatatctaatttcaggatgaaataacgataaatttatcatcatattataaactctatcattataaactttatcattctatctcaagaaactatcccaatgccatattaaagtttctctaaaaatggccagccgaaatccctgactcttttgcaacattttgaatttaccaggattaaggtagatttctccctatattccagcaactcagcaacagtgattccagatctccacttccctacgaaggcagtcctgctctctaccagatttctattagatctctcatgggctttgcctctaccagtggtgtgggtttccactgctgccttccctgtttgatctgttacattcattagctctgtgagtcttgaatctgggggttcaggtcttaagttcctgctgccctagcaactgtatttccagaaattaccatccatctagctactggccagcatgtggttctgacttccaggaattactgtattcagtttcccaggaagctcatcatgaatcatttatatgcaattgattttaccaatttttatttattcttgtcactttagtgattacagataacaactttgttcctcccaaccttaacttctgtatttttcattagtcatgcctcagtagcattttgtcacttttcaaaataagattcatctggctctgttcttagggaatgcatgatgaaaaaatattttattatatttttcaaggaaaatgcatccattcataggctaccatataatgagaaaattttaaaacaattttttaaaatacagttcgtttctctgaacttaccatttagcaggtttaatcgatgttaaccaaataattatttaattatagttgctattaaagctgtgaataagcagcctcaacatataagaacacttaacgaagagatgtcacctatttagaagtcagcaaaggttcccaaagaaagtatcctatcagctgagtctagagagtgagtaaaaatagcttgattggggtgagaaactggaataagcatatccaattagaaggtgctttgcactaatttgaatgaaaaggataaaaacctatgattagtgatatccagtcatcagactatctgtatgtactcattctacattgcaagttctgtctcacatttctacataaaccctcttttactgtacaccaactaaatttcacttcttccctaaatacaaaatatgcatttttttctctctgctttggtcattttactttaccttctcatatttcccttagctattctcatagttcttgtgattttgatattcaagatagctccaacttttagatatatgtttaaaagttcttctgaaattggagctaaactgaattagaatgaaatttaaagagtgaggtagtcaggatacgatggtatattgaatgtcgtgatcttgaacaggagaaattcaattaataaactgctgtatgtaaagaccccactttccgagctgagagagtttgaaaatggagttctcaggctcgctggggatggcagaggaggcgtgttgttgcagatgccttctaagttagctcaattaataatatcaatcatcttttacatgtctccctggtcagatatcacttgatactgtaaacaataggcacttaaaacaaaaaagatacatatttattgttataaacagaaacgaatgtagcacactacacactcatacatacacgtgcaaatcaactatactgcacattcccaaaacatttctagtcaacattgaactattggtcttataacgaaaaagcaaaaaataaaaataaaaataacaggaaataagtggtaaaacattctagtcacaggtgcgactgctcgcatcgaaaatcctaagtaatctataaaattactatagaaatattgattttatttgtctatacaaatgaaaagcatatgaaaaattaagtttaaaattaagttaaaatatattgtaataatatcaaaacatatcatttgtggaatagatcttgaatcgtatcatggatctatgaatttagggataatttttattatctcaaattcacagatccaaaacattccaaacaaaagtgccaaaattgccaaaaattgaaaaattgactgaaatttataaagtttaacagaggaagaataggcaacaccatctttaaaaggagaaataaaataggaagatgtatatcaaaatattatggtactggaattaaatatagataattaaattagtggaacaaaatagagttatgcaacagatccacatgtgtgctacctattttttacaaagatgtgaagtcaattcgaatgtaaaaacatgtcttttcaacagatggtattagagtcactgatatgtgtaaatatccaggcatctggagcaccctctctcctggattaagagtttagggcaccctttctacctttgcagagatcttgggactgaggagctttcacacctccatacctgacccgcctctgagtgtttggtgtctgccgacagaactctccctcaaggctgatgcttgtgcctgtcatcaggggacctgtcggcagaactgccaagtctggccctgcccatcttggccgctgctcccatggagctgagcagggaactcaaaccactgcgcactccacaaatcagcccattggctgagggaacagagagcttctcccagtaaacaaggatcaagttacgtacgtagccacgtcggctgcagctggctgtttcccatcagcgccatctactgacttgcaagtcaaaccacacagtccagtataaaacatgccaacagagtgcgtagggctatagaagcaaagccaaaaaccctacccagcattctctgcagtcgcaccccctaaggaagtaggaaggggaaagggagagaaaaacagagaaagaaagaaaaagaaaaaatactaccccacaaaaataattacaataattagaagtaccagtgcttccagacgagaagaaaccagaacaggaattctggcaccatgaaaaatctgtagtgacaccacgaaaggattacactagctctgcagcaatggtccttagccaaaatggaaactcagaattgatagataaagaattcaaagcatggatggcaaggaagctcaatgagatccaagacaaggttgaaaatcaacagaaagaaacttctaaagcgatccaggaaatgaagaaagagttaacatctgaagaaataattcagagcttcttgaaatgagaaactcacttagggaatttcaaagtacacttgaaagctttatcaatagactgggccaaacagaaagaataattttagagcttgaatattgaactctcctaggtagacaaaaatttaaaaaaatgattttttaaaaaaactgaagtctttgagaaatatgagattttgtaaagtgacaagtcctacaaattattagtattcctgagagaggagaaaaagtaaacaacctgaaaaacatatttgagggaataaattaatgaaattcccctaatgttgattgagagatagatattgagatataagaaatccagagaacacctgtgatttgcaatacaaaacgaatgtcaccaaggcatacagtcaccagactgtccaaggtcaatgctaaaaaaattttttaaaggcaactagagaaaaaagtcagattatgtacaaagggaactccatcaggctaacagtggacttttcagcagaaccttacaagccagaagagattaggggcctattttaagcattcttaaagacaaggaattccaatcaaggattttctatttagccaaactaagcttcataagcaaaggaggaatgaaatctcttccagacaagcaaacactaagggactttattaccgctagaacagccttacaagagagcttaaaggagttaaaaacctgctgccgcaaacacatatttaagtacatagcttacagaccctataatacaaccacagaatagaatatcaacaaagcagccagctaacaacttcgtgataagatagaaacttcacatatcaaaattaaccttgaatgtaaatggcctaatgtgtcaattgaatggcacaaagtggtaaattgaatttaaaaaagaatattcatttgctgtgtttaagagacccctcacacacactatgacacccataggctcaaagttaagggatggacaaagatctatctcacaaaaggaaaacaggaaaaagagcaggagttgctattgttatattggataaaacagactttaaatcaacaacagtaaaagaataaaaaagagcattacataatgatgaaggatttaatttaaaaagaaaacttaactatcttaaagatatatgcactcggccgggaatggtggctcacggctataatcccagcactttgggaggccaaggcaggtcagagtgagactcggtctcaaaaaaaaaaaaaaaaaagatatatgcactcaacattggagcacccagattcataaaacaagtacttccaggtctgcagaaagacatacagccacacaatgttagtggggagacttcaataccccactgacagcagtagacagataatcaaggcagaaaaccgatgaagaaattctagacttgaactcggcacttgactctaataaatatctacagaatagtctacccatctaccacagaatatacattcttctcctctgcacacagaacatgctccaagattgaccacatgctcaggcataaaataagtctcgataaatttaaaaaaaaaacaaacctcatttcatcatactctcagatcacagtgcaataaaaatggaaattaatatgaaaaatttccctcaaaaccacacaattgcattgcaattaagcagcctgaatgacttagcggttaaaaaatgaaatcaaggcaggatttaaaaattctttgaaatgaatgaaaactgagacacaacacaccaaaatcttttggatgcagcaaaagtggtgttaacaggagagtttgtagaacaaaatgcctacctcagaaagttagaaagatctcaaagatttggtatcacacccagagaaactagaaaaacaataacgagctaatcacaaatctagcagaagaaaagaaacaagcaaaatcaaagcacacatggaaaaaaattgagacctgaatatttatagagaatcaattaaacaaaaagtttgttcttggaaaggataaacaagatgattctaactagtgacctattgatccctagttagagtaacaaaaaatagaagagataagattcaaataaacatgatcagaaatgaaaaaggtgacattacaacgaatctcacagagacataaaagatcctcagagactattatgaatacctctattgaatcaggaagaaattgaaaccctggagagactaatattgagttctgaaattaaataagtaattaaaaaaactaccaaccaaaaaaaaaaaaaaaagcccagtaccagatggatttacagttgaattctaccagatgtacaatcaggagctggtacgaattctattgaaactattcccaaaaattgaggaggagggactcctccctaactcattctatgactccagcatcactctgatacaacacatggcaaaaacaaaattagaaaagacaattacaggctaatattcctaataaaataaacacaataaaaacttaacaaataattagcaaacagaatccaatagcatatcaaaaagttaatttatagtgatcaaataggcttcattcctggaatgtaatgttgtgtcaagatgtgtaaatcaataaatgtgatttaccacataaactaaattacaaacaaaaaccaagtaattatttcaacagacagaaagagctttcaataaaatccaatattcccttacgttaaaaaaccctcaaaaaaaactaggcatcaagggaacatacctcaaaatgataagagccatctatgacagacccacaggcaacatcacactgaatgagaaaaatctggaagcattctccttgagaactggaataagacaaggatgtccactctctcactactcctattcaacatagtactggaagtcctagctaatgcagtcaggagaaggaaagaaataaaacgaattcaaataggaaaataagttaaactgtatctctttgtggataatatgattccatacctagacaaccataaaaactctgccaaaaagctcctggatttcataaatgacttaaatcaagtttcacaacacaaaatcaatgtaaaaaattagtagcatttctatatataactattatttaagctaagagccaaatcaagaataaaataatatttacaatagtcacgtcaacaatcaaatacctgggaatacatctaaccaaagaggtgaaaggtctctagaaggcaaactgcaaaccactgctgaaagaaatcatagattatacaaacaaatgagaaaattttcatgctcatggatttgaagaatcaataccgttaaaatgtctatactgcctagagcaatctacagattcaatggtattcctatcgaactacaaatttaattcttcacagaatttttaaaaagtattctaaaattcatatggaaaaaaaaggatctcaaatagccaaggcaattctatgcaaaaagaacaaagccagaggcatcacattacctgacttcaaactgtcctataaggctacagcaacccaaacaggatggtactgatataaaaacagatacatagaccaatgacacagaataaagaacctagaaataaaactacacacctacagccagctgattttcaacaacttcagcaaaaataagcaatacagaaaacactccctattcaataaatgatgctgggatagctagttagcaatctgcagaaaaataaacctggacccctattttttactatatacaaaaattaacttaaaatgaattaaacatttaaatataagacctcaaactatgagaaatctgaaagaaaacctaggaaacaccattctggacatcagcttgggaaagaatttatgactaagtcctcaaaaacaattgcaacaaaaccagacattgatgtgggacctaattaaactaaagagcttctgcacagcaaaagaagcaatcaacagagtaaactgacaacctatggaataaaaaaaaattccacaaactatgcatctaacaaagatgtaatatccagaatgtgtaagaaacttaaacaattgaacaagcaaaaagcaaatcaccccactaagagacacttcacacacacacacaatacaagcagccaacaaaaatatggaacacatttcaaataaaaatcatcagaaaattgcaaattaaaaccacaatgagatgcattcaaaccagtcagaatggctactattaaaaagtcaaaaagcatcacatgctggcgaggctgtctagaaaagaaaaaacgtatgcactgttgatgagaatgtaaattacttcagccactataaaaaaataacaacttaaagcatagctacaatttgacccagcaatcccattgcaggacatatattcaaaagaaagtaagtcatttgaccaaaaaacaaacaaataaacaaacaaaaccacacatacactcgtatgctcatcaaagcaccattcacattcgcaaagacatggaattaacctaggtgtcggaggcatttgaaccaaccctcatggctgctctgcctacggaatagccattcttttattcctttactttcctaataaatttgctttcactctactctaaagacttactcggaattctttcttgtgtgacacccaagaatcctctcctggggtctggatcaggacctctttcctgtaacatctttctggtgaccacagaagtgcagaagtgactatagtgggaaacccatgacccaaagtgtaactttgggtaactggtagagtccagtaacatctttttggtgaaccacggaaggggcaatacttagaagactgcttgatccaaaggaaacagactgcagctctgatcagccaactttgggcaggtgttggggtacccaggtaaagaatgggattgggttagaggctcaagttaggggagttagagtctctcctaagacagattgggttagacgcccctcttaataaaaggcaaggacgcttgacagaccttgggttagaagcccaacttaggagggttagagtcccttttaaggaacctaagatttagggggttagaggcccctctcggtgaagtcccttttcgataagaactggtttggctctatgggatgttaaccactattctctttaaattaatctgccttgccctctttgctgatggccatgggtgaaagggttagccatgtacagatcattatgaatatggggagctttttcctccctcaaaaaggggaaacttgagagctgatgggactgctggaaaagatctgtttgccatcgacaagcagccacctaaaatttttagtgttgctgcaatgggtgggtcattctctgaccttcctgagtatctcaccttccccactctgactcaggcaatgctttcctccttctctctctccctctttttttattccctctctgaacaagcaggttgaatgaatggtaaaattcactgtttatctcctgtaaagttttgcttaatggaaaaaaggatttataaggctagtcttaagctgtagcaaagggtgtgctttgtgtgtctttctgtattattctgtcctaataaggtgtaccttaggatagaacatggatttaggacacccaggtgtgtttttcaagatggcccagcaaacttgtcagttagaaagtttgacacaggtccctgaaaaaactggatgagatttccttcttgtcttgtatgtccatctttgggagcttggccttgtaaccatgtggccatgctttctcttttcacaatggcagactgggcttaaggttcaattcctggcttagaaaatgagtcctttattttctgtctaagtattttttttttgagatggagtcttcctgtgtttcccagactggagtgcagtggcatgatctcggcccactgcaagctctgcctcccaggttcacaccattctcctgcctcagcctcctgagtagctgggactacaggtgcctgccaccatgcctgcctaatattttgtatttttagtagagatggggtttcactgtgttagccaggatggtctcaatctcctgacctcgtgatccgcccacctcagcctctcaaagtgctgggattacaggcatgagccaccacacccagccctaagtatttttatgtattatgtatgtgatgtttgtatatgaaaaagacttaactaattggtttaataacaataagagcttaaatcaaatattttgtcagaaaagttaaaagtgtaatgccttttggttcccatgacttaagtaatctttgagaaataaaaaacaattttaaagattattggcaaaataaaaatatcttcaaaaatgtaaacatctggtctaaatcatatacgtcagctatttagtttgctaaatgctttaaggttataaactgcttatttgtcttttaaaattgttcaattcattttgaagcattagattctagataaggcctgaggacatgtggaattagccgtgccccctagctatgcaaggaaggctataaagaaagcttttatataagaaaggatgttgtacggtaaattattgtcctaaagtaaaataactggttgtttaaaaagagggatgtttagggcaagtcagaaagtctaaacatgttgtacatggcctatgtaagtcctgaaaggattcgtgagagggaatttatgcacgaaatgttgtacatttaaaagtgattaggcctcctaaatgcttcataaaaggcatctgtgactcttaaatgtacaatttgcctggtttacagctaggtaaagcctgggacacatggagttagacactaggaagagtcaaaccttaactgcacttctgtctgctgtcctaggctccacgcctagtacataattaaaatcccgaatttaacaaagattttcatgaaaaggaaaagtttgtaagagtcaacagtgcaacatgtgtttgagactaccaaaaaaacccaattttacacacaagtcatgtcaggaaagtaggatgtacttttggtaaaagagtataagaagacatagaaatgtgaatttcttgcctatggttagagagttaagaattgttttaagctaaataggataaagatgaaggttttagcaagttgtggaaggtttgtgaaaatgaaaaattaattgtaaaagagattctgtgtgtgaacatattggctaaagttaaaggggcattactcagtttttccataaattaaacattggaataaaagcacagcaggttgttcctaaagcaaaagcctgcatataatctgctctttaacaaacattgtaaagaatttaaaaaggtttatgaggatcttaccttatggtcaaactgattacaactggatagatttatttatataaggttttataaagaattgggtttgacatcaataatgcgttaatgcaacagtgacatttggcttatttggtataaaaattatacgaaaagcattctcaaatgtgaaatggtgtttggctttctttgggctgtatttgcataaatgtttcattggtatatgttccaaaataatgggaaagccctataattctaatatgacttagtatatattattaataattataattgtcattgtatggcacagaggtaaccaaatttctctgtcaatcatgtttttgactgtggctgtcctaagacgttttgtcacctacagataattgttgtctcattttagtcctctttagaaggtggttttatagtcagctacagaactccaacaggtacacttgaatacagatttctgataactttagagactgtgacatcagaacagagaaaacaacttccagaagtctcatggagagctaaaatgttcatgaatatcaagcagaacagaaattaacttcatggaataaactgaagaagtctaaagtaatccgtttatctttttgcttaaaacattgctgattctttgttttgtttttcagaatgaaggaaatttttctttagagctatttacagcctttgacaattgagtagagtatactcctgtgaacaaaatttggagcatatttgtttctctctagctgatttctccagaatttggaaacacatatttgtgagtattcttaatttatggttatatggttatttgcataagttcagtaagaatctgttttcttttgcagcaggacaccattggagaaactggttattttaccacagctttgtctggaatggtgtgttttcctttaaggaatcaaacttgacttgtaaagcctataaaagcccctgggaacctggccttacaccttgtctaccatagtcccttatagggtttgtgacctgtggtaagtgaagaatgtcactctctaacaggtccaggagccccaagttatcttgggaccccaagaggagaggaatttactcaactcatagatatttgaaggtgcaaacccatgtctgggctgggctcttaaaaagtcttacctacgagtccttctatggagcagagttccatcaaagacaatttaaaaagagtttatgtaacaaaataattattctttctgccatttatacaaataatcaggccaagtataataaagccaataagtcttatcatgatttgtctttagtaaaaatgaaaaactggagagagaaatattatgtttccagaactatggtacagttgttattaaattctcatctcatcagttgtttataactttgtttctgcaatgtaggctaaccctacttattcttgcgtaccaaccagtgatctctaactgctgctcagaaaaaacaagaaggatgggtaatgtaaaaatctaaatcagttaattctgggcacattgcaaatagctagcaaccccacatcagcttggttccacctgttgcccagttcatgaaaagtcttctaatttagtttgtttgggataattttacttgttttgctttattcttgtggaatatattgctgttgtactcttggtataggaatgcagaataagcttactaaatgttttcttaaattgaacacttaattaatctcccagatatcaccttttgtcagaactcaagagttataaatgaccctcagcataccaactctttctaactgagctcctctctaccctgaacacaagagaccctaatggttaggcaggaatatcatcgcccgtattcagcctgaagatgttacagaagatggatcttcatccctcagcaacccttaggattaagagttttcttataaaagtgggggaaatagcagaggtgtttgaagcagagctactccatcttgaataggagctgggttaaataagggtgagatctactgggctgcatttccagatggttaaggcactctaagtctcaggatgagacaggaagttggcacaagatacaggttataaagaccttgctgataaaacaggttgcagtaaagatgccagctaaaacccagcaaaaccaaaatggagacgagagtgacctctggtcatactcactgctacattcccaccagcgccatgacagtttacggatgccatggaagcatcaggaagttaccctttatggtctaaaaaggggagacaggaataattcaccccttgtctagcatatactcaagaaattaccataaaaatgggcaaccagcagccctcggggctgctctgcctatggagtagccgttcttttattcctttgctttcctaataaacttgctttcactttaaagacttgtcctgaattctttcttgtgcaagatctaataactctctcttgcgtctggattgggacctctttcaggtgtccatcagcagtggattggataaagaaaatatggtacgtatacacgatgaaatacttagagccataaaaaagaacaaaatcaagttctttgcaacatcaggaatgcagctggaggctatcatcctaagtgaatttaaagcaggaacaaaaaaaacaaataccatatcttgttacttacaagtgggagttaaacatttggtacttatgggcatgcagatggctacaataaacaatgggaacttctagagtggggagagaagaaaggggcaaggattaaaaactggttgggtactatactcagtacctaagtgatgggatcaattgtaccccaaccctcagcatcatgcaatatacccatgttatcaacctgcacatgtgtcacttgaatctaagataaaagttgattttttattttcaaaaaagaaggcgaacaatacataggaaattaccaatactaataactactttgggaatacgtaaaaaaattcaactttagtatcaataaaaatataacaataatgagggaaaaataaacactaaacaaaagattccatgggtatggccaataaacataaaaaaggtgtataaaaatcactagtcaccaaataaatgcaacttaaaaccacagtgagatgccacttagcaaatggctgaaagaaatatggcaaatgttggtgacgatggagttcgtaggcgtctaggaaattgctggtgggatagtaaaataatgaaactaactttggaaaactgtttggcaatttctaatttagttgagcatatgccgactctatggtccagaaatttcattcatggttttcttccccccgagaaaaaactaaaaacatatgttcacaaaaagaaactggaacaatcaatattcattgtgctctattttttaaatcttgagaaaatttgatgtcagtcaatagatgaaagaatacacacattgtgatattattaacaaaagggaatatacggcaccaataaaatgaataaaacatatcaccacatgaagcttttcgaaaacattaagttgagtgaaaaaagatgcatatgataaaaaaaatgtatgatttcatttttatgaagttctagaagaagcaagttaatgtatggtgatagcaatcactacagtagctgtgtctggggtcaggaattgatttaagaaaggaacatgagtgaattttctggagtgaagaaattttctgtattttgatcaggtagtcattacacaggtgtgtatattcatcaaagacaacaagctctaccctttgaaatatgtgcatttcatggtatgtaaatattgattgaataaaaaatattatttaaaaacagaggtattcttatagatatacctctgcttaaaaatatttaatggcttcttgttggttttagaagaatgtctgcaacaccaaattacaactctaaggacctgcctagaatggctccaaaatacctctgtggcctaatttcaaactcttctttccttttctcttaatgaccagccaaaatggcttttagtcatgccatacacatctcaaaacttttttttttttttttttttgagacggagtctcgctctgtcgcccaggctggagtgcagtggcgcgatctcggctcactgcaagctccgcctcccgggttcacgccattctcctgcctcagcctcccgagtagctgggactacaggcgcccgccaccacgcccggctaatttttttgtatttttagtagagacggggtttcaccgtgttagccaggatggtctcgatctcctgacctcgtgatccgcccgcctcggcctcccaaagtgctgggattacaggcgtgagccaccgcgcccggcccacatctcaaaacttttgtcctagaaacacttctggtaccacttactgattccatacttattgtttcaatctcttttaaatgttagtcctctgagaaacatttcctgacttctaagactaagtaaagttcccttgatgtatattattttagcaaaaaaccagctcattatttttgtaattaaacaattgtttaatatttacttcatctgttagactttcagcccagctagaacagagaccacgcgttttcttaattcatttattatggagtaatgaatgaatataatcttatttttaaaaatatattcagcaatatatttccacagcaaagattctggttcatggtaaaggctgaataaatatattgtgaaaaagggtggtactgacaaaacatttgacgatgtattctgagacatgactaataaaaaacagtcaaacaaacatggggtcagggtgttgaggaggacaaagctgctctctgtagccactcatgaggtatgcattaatgaatagaaattgttgaaatcaaatgcctagaaatgatttgtgagagaatttcctggaaaactggttacattaagtcttggaaatcagaactgcaaaccagttggtaggcagatgaccagtagcttctaagattataattgcatgggcagtagttgcttgggaactaaactcctgggttcaaaatgcatagcgcaagcatctgtcaaagtatgcagcaggagggagctggaagaatggaggcaactagatgtagtccaaataagtgccagccgatttcctgttaatcatgtagaatgggatcaacttggtgacaatcagaagactgtaattcactatgctatatgcagttgctgaaatagagaataaaagctgcattctgggaaatttagagtgttgctagagatttggaatgggagagggtggatgtttcctaactggtaatgacatgatataaactcaggagttacaagtctctcgtgataaaataataaaactttcttgttttgactatcagctagaaatggtacctttatataataaccggggcaattgtggtataagttcagagtccccatcattgagttttgatcatttgtttgtgagcactctattatactgctatctatctgtgatcaatctatctttgagttattttctaaatttgcatgtttactagttttggtaggcagaataatggctcctaaaagatgttcaaattctaaattctggaatttgtaaatatgttccttcacatggcaaagaagaattaaagttacagatgaaattaagcttgctaaaacagggtgagtatcttggattacccagccgaacccaatgtaattgtaagtatgaagtgggaggtaaaggcagaaaagtaggtctaagcgatccactatgaaaatgattggactcaccactgctgtctttggagacagaggaatgggaccatgaaccaaaaaatgtaggtggcctctagaacatccatctccaaactttttggtaccagggtcaggtttcctgaaagagtttttccacagattggagcaggtggggagggatggtttggggatgattcaagcacattccatttattgtgcactttatttctattattattacattgtaatatatcatgaaataacaatacaactcaccagaatgtagaactggtgggagacctgggctcgtttttctgcaaatagatggtcccatcttcagatgatggaagacagatcatcaggcattagattctcataaggaatgcgcaaccaagatctctcgcatgtgcagttcacaacagggtttgtgctctgatgagaatctaatgctactgctgatctgacaggaggtggagctcaggcagtaacaattgctcaactgccactcacctcctgctgggctgcctggttcctaacatgccatggaccagtaccagttcatggcccggaggttggggacaccttctctagaatctgtaaaaagcaaggaaatagattctcccttagagcctctggaaagaaactcagccctgctaatactttgatttagcccagtgaggtcatcaattcatcagattttgacctacagaattaaaagataataaatttgtattgcttaaaactctaagtttaatctaatttgctatggcagtaataggaaaccaagattaaagtgtattcctgaaagccagaaaaccattcctgcatctgcaatttggagacagtaacagaggaaacctcagcctggccaataagctataggtgctcctcattaaacccttaccattgcctatgttttggggatataaggcttgatcattactcttgagtaaatattatgagcatgggactaactagaatcactaaaattcaaaaaatccatgaagttataaaaaggaccaagtttatagaggatttcacagtttgtcattttaatttttgtaactcaatcactgataatttttcctatgcattttctttcattattccttatttctttcctctaactatataagcaccatgactatttcctaaacatgatggaggagaaggaggagggagaagaagaagaagaggaaaatagggagcaaatgacggaagtgaggagataagagaaaatgtcacagctggatagatccaataaaataaattgggtggaataaagtagttctactcacagctctacaatagcttgctgagtaacattttaaaattctatctaacgctactgtttccatttccacctctgtagaataagaatattgaagtcgatgaactctacagctctctttatatttcatattttatcacattcgcagtaaaagaggaagagaacatgatgagatgactgttatgtacttataagactaagttttttgtgaagtgtctaataatctgcattatatttctaatttcagagaatgttagaagatcttataaaataaagaataggaaaatacttgaacattgcttgttttatataaatattatgtctgccattaccatcgtattgtcttagtaccttactttttataacacttggatgtaagagagcagaacagcataagtacagtctatccaattttatttcaagatacgacaaaaaacaatcatttttgatgatagtaaaggcttcagagttttcaattagattcagtttatattttggcaaagaacccaggtacaactaacacctgctgagcctacttccttcccatcaaagtttgttgcctgcctttttaaacaaatggagatcatttgagcagattgaaaacagtaattggggttcagggatttagctaattaaaaataagtgatactcctgcactatgatacctgaagctcataggtgctcttttctaaacatttacatccatgtgttagtcttccattttaatatacttcatgaacaggcctaatcatataagtatgaattttgttcatgtactcttcaaacttttctgttacattctgtccttagagatgcatggcatattcaaggaatgaacaaggatagtcaatgctcttaatactatcagtaacttactttttataacgctttgatgtgagagaacagaacagtataaatacagcctatccaattttatttcaagatacaacccaaacaatcatttttgatgattctgatgaaaggttatcatcaaaaatgatagcaaaggctatcttaactatcctgacgaggatacttaagagaaaggctatccttggaaactgtgagaatcccagaaactcctgcttaaagaggaggaaaatatctaaagcccaaccaaaattagtgtggagatcccacaatctgggcattgcaaagcccattaccagaagcaatgacaatgcacatcctagacaatgctttactaataaatagcaatattaacagcacatttggacagaagaataaagagtttattaaaataaaatctttttcacttcctatctcttttggaaagaaatacaaaaactataaattatatctataatgcagtttggatcactcattgatccaatggcttcagatatctgaattataaaatccatgccttcccttcccagagttatagatccagattgatccagttatagattattcattgatccaaactgcagtttgacagaactaacatacaacccagtttttgagggctggaaagtaaggaagacctggtgatcaataatattagaatacttctcaaaggaagaaattaacagatgaccttactaaagaatatgcatttctcaaatgagttttaccagtcaccacattagtcagtagaaaccagatctacagaatggctgataacaagatgaatggaaccaccttctaggtggaaaatagattggatggcagaatctggatctataactctgggaaggggaggtatggattctataattcagatatctgaagccattggatccacagcccagtgaggagcagctcctggatccacagctcagggagcagcagctattggatccaaaaccccgagacccaacatgcatagtcaggcaagaattgcagagcatgtgagtcctggggtagtagcaggaggtgtggcaggggctggactcaacacacaatgtctgacagctgttgggcctccagcaggtctcctgacagcccctatagagagaggaacccagctggcaggtgctgggagagcagaggtcagtgctgtagaccaggttgctggggtaggaagagccacaggaggagcctgggtagtgcaagtaacccccgtgggagcaggaggagaagtttctagagcaacagttgtaggacatgttgacgggaagatgtgagttcagctgagtgtacctgggaagattctgagttttaacgtggcatcctggacagtgtcatttatatcctctcagcaataggtgtggtgcacagcagagtcatccctcacatttttgtgctccctcatttacatatgtgtagctcagcaatcttgcctgtaattgcatttgaatacttttccacatgttgtatttatgcgtgctataattttggtgttatagcacaaagccaatgaactgcacttatgccagaaatgctatgactgtttcgtattaatatttattttattatgtctaggaaagcacctccttttcctcctagcataattttcatgtgtcttgttattggctgttatgggcaataattttccctaaacagtgagaaatgagataaagttacatgtcttttttgtcaatggattagagacacaactttggccttaatgagaaacctgctgaaaactaaacctacatgtcaccatcctttctcattccacaaaagtttccttcatctattatgtactgttactcactgtgtctcacatccagtgtagagggaaaagtatgagccaagacaaattgaataacattgatgcctatgaccagaaggaaacctggacaattatttggagacatggtgacagcaagggatggaactgagacaatcacaaatgaaaaacaattctggggccttatgaagagaattaaagtgttaaataaacacacaccattgaaatgacagaaaaaaataaatgaattttagattcaatgcatctaatatgaggcccatggtcctaagagattctcattcatatgtgtggcagcctggagaattctcatctcggatcttaaattacaggaggcttaaataaccagtggtcctacctgctgtgttctaaaagttaacactgcatttttggggaaggcttgctttctctgggctgctcccaagcaaagactgagcacagtgggatataggaattcctggaagacaattgacggccagctttgactcagggtttcctcaacggccttaaagaactactgtctcctgcataggtctcaagcacttctttctctttctccttcacttgggccagacctatgtccaaatcttacaactctcccagcctctctcaggggagactctggaaagagaaaaaatgcagaaaatctgtaaatatttaatcttgtttatactttttaaaaagtgatactgtttggatttgtgtccctgcccaaatctcaggccaaattgtaatccccagtgttggggaaggcctggtgggagatgattggatcatgggggtggatttcccccttgctgttctcgtgctagtgagttagctctcatgagatctggttgtttaaaaatgtgtagcacttcccccttcactctttctactgcttcccttgtaggactgcctgcttctccttcattttctgccatgattgtaagttccctgaagcctccccagccgtgcttcgtgtacagcctgcagaactgtgagtcaattaaacctcttctctttataaattacccagtcacaggtagtagtttatagcagtgtgagaatagactaatacaaaaagtaaaccaattttttgaaggatagcaaaaaatttaaactgaacattttatcttgagtatgccaatcagggtaaacaaaaaaaaaattatttcagttgttcaatgatttagagaaacaataaacaaacttttgagtttagttttggagcttatgttcagactgtctccaggtaatatctgctaaaactcattttttcagccatctccaccttagttagactagatctacaccattctcctattatttcacgtgtgagttgatgtcttttatcaagattggtaaattcccaactgtactctcttcaaatattgcttctgccccatcctctcatctttcttttgcttagattccaattataagcaaggtacactttttaactacattacatatggcttatactcttttttctattttcaatctttatatagaagtattggcttttgcttattgaggttgtaacctggatggttagtgaaagcaagattttccagcatgttagtgacaagttgcctggttattttgaaaagagaagcaggtaggtgccaaacgttgtaattttcaactatggatgagattctgttgaaaacatatctcaaatatccaaagccattattcatagcccagtgaagagaatcatctgtcaaaagatcagaagccttttgatgtatatccctgagccatatattttatgtgaaagatctcaatttttaattgttgataaataattcagtcaaaaaaagaaacaacaatgatgaggctccatattaaacagaacaaataatatgatctccaagatgaagtgagtccaaagttgtggcatttacaagttcttcttaaacttctatcaaattaatgtggacaaagttttagagatttagaggcagagagaagggaagaacacctcttttcacaataactggttcagagaaggatttttgaataaggagcctggattaactgaagacaaattcactaaatcccttagttttgcctgaataaattcatgctctccatttaactcataagttttgtattcaagattattttaaagagttacatttgaaacaaaagaaaatggggaaggaatagtttccaaacctacttactaaggtacaaggttaggggaaatcaactgccattgaaaaatagaaagtaactcactgaatagatatttgaattggccatatttgcttctttcttcattcttccttctggaaggcctatattaagttacttttcaatattgccatacattttaattgagaaaatttaatcgagaaaatgtctaacattattgttgtaagtttattatattttattataaaataaaatgtcatcaaccatgacagtacactttctttggtcctgaatataatttaactacttgtatttcaacatagaatattttgtgaatgaacttacaaagtggctatcctcaaagaatacgacaaagctgtccaatttttatttttcaacatggaatctataattcagcagaggcaaacaaacacatgaacaaaacataaaatataacaagtaaaaaaaagaaaaaagataaaatcaaacttaagcacagaaaaaagaaagaaaaatagagggaaagaaagtcagaggaagagagagagaaaataagagagaaacattcatataccatgcagaggaaaagaggactggggaacaaagaaacttcacattttcacaggaaaatgtaggatggtacctggttctacaagtggcaaaaagacactgaaagccagtaatatggaaagctagagccattctaagaaggtagaagtcctgtataattacaaaagtagatgataaatatatcaaagttcataagatttgctaattttgaaaatttttgctcataaagacattgagacaagacacatgacagctggaatgcaataggaaaaaaaattctgaaattcctgagctttctctttgtttctctttcacttgtttcctcccttcagcagacaagcattcgggctctttggctgaagagacatgacctcaaattgatcttctctgtgactgtgtttcaatcgagcttctttttgttatctcgtctttaaataaatggcaaggtttctttcaatttctagccatttctttctatctctttgctttgcctgttcttgatctttcttcactggatatgagacagactttataactgtagtacttaatgtattaatttactcttaccgccctaaaaaatcaccacaaagtaattttggagtatagcaatcaatggtgacaagatggatcattttcacaaaggttctcatccaggtggaaattgcaccagaaagaaactaacgttatctcattccccactcttaagaggaaaacatctactagcaaagccagatgtgaatacacaggaaaagaggcagttagcatgtgccaaagaaataggaagagctttccttgtcatgatgagctagacattaatataaaacagtcatagcatttctgacataagtacagttcattggctttgtgctataacacgaaaattatagcacccataaatacaatacatggaaaactattcaaatgcaattacagacaagattacgcagttacacatatgtaaatgagggatcacaaatatgtaaaggatgaccctgttgggcaccacacctattgctgagaggatataaatgcccttgtccaggatgcgacattaaaactcagaatcttcttaggtacactcagctgaactcccatctctcatcagcatgtcctacaactgctgctctagaaacttctcctcccgctcctttgggggctacctgtactacccaggctcctaccccagcagcctggtctacagcactgccctctgctctcccagcacctgccagctgcgttcctctctctacagggactgtcagaagacctgctgggagcccgccagctgccagaaatcctgctaccgccccaggacctccatcctctgctgtccctgtcagacgacttgctctggatctctaggctttcggtccagcagctgtcgctcccagggctatggatctaggtgctgctactcgctgggaaatggatccagtggcttcagattcctgaaatatggaggctgtggttttccttccctgagttacggatccagattctgctacccaaactacttggcttctggagcctggcagtcttcttgttacagaccaatctgtggatctcgcttctatcaattcacctgctaaatttctagatccttttgagtattgggatcaaagtctctactgaatgcagccattattttcattcttgccagatcccaatatctttttattcttccaccaccagcttcttgcatgaccaacttctggcagactgcgaaattaatgagtaacctaatattaacttctaatatctttaccattgatcgaatatatgctatctgattttcatccaaaaactgttgaaaatggaaattttaatctaataaatgtatgtaatctggtacccaaatatattgttcacattgttattattttattattattattttgcttacatttttgcattcaagaatttgggagatttaagtaaaaatcaatatgactgtgtaactggatttggggcccatataatctgacagatctgagaacatttctcttgaaattaggtatgttgtctattaagagtaatcatttctggaagaacatagtttgcatctgcagacttgtctcaacagcagtgagaattgtctaagaatgaaggacatgcatttctactgatataggaaagcagaaaatttgatgcataaactagaaatgcagacaacaagactaggatgtaatttataaggtaaactgtatgcttgcactaaaggttacttaaagtctagtatctgaatgtggattttcaaccaagagaaaagtgaagcttaagcactgctaggacagacgctttgctctttgttagtagacttaagtgccaggtttcctgcctcccactggtaaggagagtcaggatcattcaccaatgatcttaagtgggaattattgggtccaggaggcttcggtaacctaccgatgcttcttcaaggctcaaccttaatcaagctgacagcaacacacctgagccatgctgaacaagcatttatatccattagtcttactctggatcctcctcttctccccagaacaaggctaatgtcaaagatttgggtgcaaacagtttatgtggcacaagatcccaggaagcaagtatgagacactatggaagatgaaagaatcaaagaggaaaatctaaagaaagggtgcattttcgagtttattttatggagagcaacttggctaaatcttgtaaggaccttttaggagcatgtagaatgactcttggaattgtcccccacaggatcagatcaacatggaaaaacatttatccatccgcttctttctcccattggctgaacaatatccaagatgtgtaattttcaggaaccttataattatgcaaggaaagaatcacagtgggcaccttctgttttcctagttgtgacctggaagaaacccaggtacagtaaaagtggcgttgcatatgactgagggcagatgttgtccacacaaaggtggttgaagccaacataaaatggtttgcattgctatgcttgtggtcataggtgagtgtataccacacaagaaggcaaaagagttatcaggtaacagattttcccttaatacttaacatccctgtgagaaagacaaatactgtatactatagacctttacaggcatgggggaatggaaactctaaaaggatttaaaactggccaaggcttacagatcaaagacctggtagaatatgatctcttgaatgaatcttgttttgttactcttttctggtttttcttttctttttattaaaaaatacaactcctagttcaaccaaggaacacttagtatttctagtagtacagaaatactgcagaattactattcatctaaatggagatgatccactattggatttatttgtgtagcctcatgagtagtatcagtaataaagaatgaaaatacaaataaatttagagtttaggagaagagctccaaagaaggtaaactaatttatttaaataacattttaacggttataacaaatagtagagtaatagaaaaataatcaatggcatctcaggaagaaaatgttatgaattctgagttctatgacatatcttaacattttaattattatcatgagtgtaacttagttttttcagatttaggatccaagatgatagatataaagttctgccttcaataataccaagcattatgaacaagaatggtgaaattgcagactcttgcaacatctcactaataacgtaaatcagattcccattttggtgagattggactgaagggggatggaatcaatcagagtgaattcatggcaatgttcttgagtaaactaataatatagaatgcagaagcagcatacaatgtgtaaaaaatattgataaacataaggaaattcctttcatttacttttctgtataaaacaatacaaattattgcttaaaataaatgaaacaagagctcaaagataatacagtagaaaaacgtgaacatggtgattaacaaggtaaggaaaagtattgattgccagtacaatttagagtatatacaaagtgttttaaaatttttcaaattatatcttctacttttattgatagaatattgcagcttattcggatacaaagtgagttatgtattcaccacaattaaaaatgtgcgtcttctccacaggactcttattttctttaccatgatgtccttaccaaaatttgtactttttatcattatggatacaacagataatctcatcttcaatgttgaacttttaaaataactttacattagctttatcaaacagaacattatgaactttttatagctttactcttttgggggggctaggcgaagaaatcaaaacattattggaattaatttattttctgtttgaagcatttgacagttctaatataaaactgaattcatttaatccctagtgatttgtttttcctgctactggaggggcatgtcattaactattggttcaattattttctgtacatgcacaagaatatgtataatttaacacgagtgaaaatgacttaaaacagttatttgacctaaatgaaaatgtctgtatcagggtgatgtattgacacactttttgcaactgttaatagtaaataatcatcttaggacttggtcttcttaaacatttttctgtcttttgaagtagatactgatgtatcttcagtaaaactatgtctttcacttttcatgtggtcaatgatatcacctactctcatgttgaataataaatatcatcaaattgttgtacaagttcatgcagtcaccatcaaccggatttagtggtagaaattcagaacccaacttttgtttttttcattaaaaaatgagcttttatttttggcttattttccttttcttctatctacaaaatttaaagaagaaaagtgttaccgaataataaaaaatagttgtagatttaaaaaatacaagacatggccaaatcactgtagcaagagcatttagattatcctttatctgtggctttgtggcagtcaaaatttcatgcccatacttcacgtgcacctagccagcaattctcaaatttcccactaactccacctactgttggcttgagagtattgccgcgtcttgcagctgtggaatgggccatcgcactaccggctaggtctgaacaacaaatgacccacccccaagacttgaacgagtaggctgacctatcacttgtatgtaagtgtaatttgtttctcaaatgctctgtctgcatgttctctttgcaagaaaagttatagtttttagcggggtgtggtggtgtgtgcttctagtcctagctacttgggaggctgaggtgggaggatagtttgagcctgggaggtgaaggttgcagtgaacggagattgtgccactgcaatccagcctgaaccatagcaccgcaagttatctcaacaacaacaacaaaaaaaagatagttctattttgtttagaaattttaagaacaattgtaagcattctgtcttctttcagatttaacaattgaagtaaaaactctgctcactgtgcgtgctactttttcttcactagatgaaaccatgacaaaagtaaagtagaaatttcctaaactaatcattatttatgttaatatattactgattataaataaataaaaagttaaaaatctgagacaatcaccaaatggtattggatactgaaacaacaacaacaaaaaataaaccatgccatattgttacccagtaggtaagtatctaggtcttccatttaataatgttgtacttgacttaaatgataaaacatttgaggcttaactgctgattcaaggattatcagctacctggatatttagcctaatcctgtaacaagagaatatttgcactggttttgaattttattttttcaagaaagtgctgccaaccaaacaacttaaaaaataagagtaagttgagacttcatcaagtttatagaactgattatataaaacaggttggtcctacttgctaacgaatattgaaatatgttagcactttcatttggagaattgatttcttacctggcactaaggctaggggatctggattcctcaacaaatctaactcactaaaatctaactttttactggatatcctcactctgaattctcatatatttcagaaaacattttataaaagtattctttctaccaaaattatgtgatacaatcaatttaatagtcattgcaaatgtaatcatttatataaaaatattgatgtttctaactccctgcagaaaaagaagaccacagtggttagtttgtttgtagtcttaaaaatgtgtcctcttcattttatcacgtgaagatattaatagatggaatcaatatgaaagatgaaaagtcttctaaattaaaaaagaatatggacaattttactttttaaaattaaaaataaattaaacttttattttagggttaaaggtacatgtgaagatttgttacataggtgaactcgtgtcacggggattttgttgtacagattatatcatcacccaggtattaagcccagtacccagtagttatcttttctgtttctcttcttcttctcgccctcctccctcaagtagatcccagtgtctgttgtttccttctgtgtgttcatgtgttcgcatcatttagctccctcttgtaatttacaacatgcactatttggttttctgtttctatgttagtttgccaaggagaatagcctctagctccatccatgttcccacaaaagatacgatcttgttctttttttatggctacatagtatttcatggtatatatgtaccacattttctttattcaatctgtcattgatggccatttatcttgattccacatcttcgctattctgaatcatgctacaatgaacattcgtgcgcaagtgtctttagtagaaaacacagaaaaacctagccagatatttagtagtttttaagacaaaaagtaagcaaagaatattaaagcagatatgcacatgtaatgttacccagttttatttaaacttacgttcttcactttgtaaaatttaaagcaactactctaggggaaataactaggagatacagtaagagaagtgtgctttgatattgcatatctatataattataaataagcagttttgacatcttgctccagtgaatattttctagttactggaattcagattattcctcatctatcatgggtaacagtagaaatcaaattcgtaggcaaatgataggataggagagcaatagacggtatggatatatggatatggacacagtaggtattgtgtttaagtttctggttcctcaaacataattactaaaagtcatattcacaggctggatggtaagaagcagactggcagctactagaagaatagaaggttgggtggtaaaagttgggtctataatttagggatgtgaaagcaatgggacaataacccatggattggaatacactggatacaaagcccagggatggagagccacagccaaaagattgaaagcccctggatccaaagcccagagatccagagtaagtcatctggcagggcctgcagagtatagaggttctggggcaatagcaggagatctggcaggtgctggacactacacaggatgtctggcacctgcggagctcccagcaggtctcctgacagcccctgtagagagaagagcccagctggcaggtgctgggagagcagaggtcagtgctgtagaccagtttgctggggtaggaagagccacaagagaagcctgggtagcgcagttatgccccacagggcgggaggagaagtttccagagtagcagttgtaggagagagttgacttacaatgacaaggttgtgactttgaatgtcacttcttggacctggggacttatatgcccttaacattgggtgtgtcatccacatggcacataaaataggttacctgccaactttaaatgaattaaaaagataatcatagtcagacatatgtatttattgtgattttacagctaggaagtgcagtaatgtttgtgccttgggattcagttaatagtgttgactctttaaagctattactcatcttcccttaccaaaggtcactcttcagataactcagagaatcgctttagaggtagacagtgtctgggctgagggaagctgccttaattaaaaataattgatacccatttcacaatctgtctcaaaattgttgccatctggtgcacaaagttgccagctaaccaatctattcatagtcatttctttcaaacaaaaacatacattcactgtcaccgcaaagtagcaagctaacttaacgaagaatgtcatcagaaagcagcaatggtgatatgcaagatataatgtctttttaaaaatcaaacttcaactggaacagctttaatgaaatattaactgagattcccttattttctgtgctcctgtttaaaactgtatgcagactattaggagccaatcttagcttttctttccttgggtgtgtgtttactgttgagtgaattaaaaataataaattgctttatgtattttggaatggtcgagattattcatctaagatgcttaaaaggcattaaaaataaaaacagatcatgtgtcaaagatgcctagtgtatttctacctctaatcagagtcagtgtttcccactaaaagaattccccagaatctggaaaagattcctgttttaaagaaagtttataaagtaactgctttgagatggtgagacaaaggcagcatcttaggaagattcttcctttgcctcaaaaataacatacatgactttgacgtaaattattttcaggtgtttctgacaggtattacaacacttctaaaataatggtcatattttctcttgttctgtgacttgtatttcaccttgatgtaatggtgtaatgagactgatatcttgaggaagaggagagattgagatttatcttgctgtggtttctgtgttgtttgatttgctcatttttagaaaaaagtttccattccacttctgaatgaaagtagttgaatgcaaaaaaatccatactttgagaaaagaatgtgcgacattacttaatatctgatccctcagagtattcttctactgaaattgcttatataggaatggatgacattaaaacaagaaagcaacttcaatttaggcgggctaaatatttgtgtggctattttgatattcaatattttattgacaaacacaacaggaagatttggaatctactagaatgctttttggctattaataattgagaagcctaataaataagaattgtttattccagaaacacagaacaaactatgttacttaataaatgaaacatgattggagatcaatttgtctcctcaaaagtttagacttataaagtctacaatttggaaggaagttgagcaattatctccagcctcctgtcagattggaattccacttacaacatcctaattagattttcccagggccctcagtatggaaatatcattaattgcaagagcaactcattttagatttttagctgaatcttcccctaaaacttttacctagtaatcctgattcttcatagaagggagtctcagttcacttccattgtagaatacatcagttctgaagatggatgtcttaagaggtttgcccattcccacaggttaaggcatttcctgcatccgtgccatatatctatttacagtttgctctgatgaactttctgagcgaatccagaaaaatcctcattactctagtactctaggcagaatatatatgtcagctgatacatcagaggtcacaaaggcattcactctcaattacacattatcatcatgtatccttcccacccctttatttcaatttataaagtcatttgttactatgaattctttacatattttatctttctgtgaatactacatgggatagacatttccctcatttcttgcttttcttttccctctctggtaaaaatgtcaccctctgagagaaaagaaaggaaaagattaacgatttacattttacttatagtgcttattattttcctctcagtaacatcaacatgaccaaaaattacttataccttatggggataaacggttttttataatcaaacttattgatgacttctatgaagaagcaaatcaacctttgagtaagggatttctttagtagttttacaatgtaaacttcaaagcacttgttcaaaaatttcacccttcattcttaactcttcatgtgcacaagagtgacttagctacttgtgttataagaaatctaaacttaaatatgttaggcactcatttagcatgtctaccaaataaggattgttattgggttatttcttctaatggttcaaagaattgaaagaaggaatagatattgaaattttttttctgttctcaattgaatttataaaattggagcaagatcaaagtcccttccagattacaaggtatttttcagatctttacaaataccagaactctcagtgtcttagccgtttgatccaatttctagaaggacaggatgaatgaagcatcaagtttttttctttgtttttttgtttctttgtttgtttgtttgttttggagatggaatcttgctctgtctcccaggctggagtgcagtggtacgatctcggctcactgcaaactccgcctcccgggttcaagcaattctcctgcctcagcctcctgagtagctgggattacagccgcccaccaccatgcccggctaatttttgtatttttagtagagacggagtttcaccatgttggtcaggctggtctggaactcctgacctcgtgatatgcctgcctcagcctcccaaagtgctggaattacaagtgtgagcctccgcgcccgaccctttgaagcatcagtcttataggtacaattatggtggttttcattctacctaagcaagatgaatgagaaatggcatttttgtttcatgaacaattgctttgaaaaactaatgaaattctttcatgtagaagtctacgttcataaataaaattctttgagtgttaatatatttcattttgactgcagcctaattaagtgttctcattagaatgggcacttgtgactacacctattgctagagtatgtcagtgtccagtatagaaggtaacattcacacacacacgctcctcactgcaaatcacctgagctcagaactcctgttaacatgtcttacaactgcagctctggaaacttctcctcctgctgttttggaagttacctgaggtatccagtttccacttataatttgttctaccccagcaatgccatctattctccaaatacctgccaactgggctcctctctctacaatggctgtcaggagacctactgtgagcccaccagctgccagacatcctgcactttggccagatcctatcagacatcctgttactgcccaaagaattccatcttctgcagtccccgccagactaactacataagatcccttggatgtggaaacactggccttggatctcttggttgtggaagcactggcttccaatctctggactgtgggtccagcttctaccacccaactaccttttcatccaggaatttccaggcaacttgttactaaccagcctttgggtctcgcctttttggatcatcttactgaatattctccattctctcatgattatttctgtactctatggaactgcaacactcagcctgtccaatatctgtgattgttgaccatctacatcagtaggactcagcatcctagccctcttggaagtatatgattgaacacggacaaattaatcttgacctaggacccttcctaaatctgacaggagatatatcttgaatttcaatttttgtgccaatgctcaggatcatttctgttatcatctttctaaaatccttctctcattattttcccagaactcttccactcaaatatatttcaaatagttacaatattttaaataagcttatttctttggcatgaattctggcattccattttattttgttaatacaatacacttaggctgggcatgatggctcacacctgtaatcccagcactttgggagactgaggctggcggatcactttaggtcaagagtttgaggccatcctggccaacacagtgaaaacccatttctactaaaaatacaaaaattagcaaggcctggtgtgcacctataatcccagctactcaggaggctgaggcaggcgaatcacttgaatctgagagacggaggttgtagtcagctgagatcatgccactacactccagcctgggcaacaaagtgggactctgtgtcaaaaaataaataaataaataagtaaaaatgatacatttagtgaattcatcccatatcttcaactgtcttccttaggtacactttttgtttgtttcatatgttttattgatattttgttgaatagaaaacaaagtgcaaagaaaatttaaatatataacctatcacatgttttaagagatttaaatcccctcataagtgcattttttatatatttgcttcagaaaattttgttttagtctttcattgaaaaaaaatttattgaggtcctattatataccaagcattacgctgaacaaagacacaaattctctgcttcaggaagttcccacaaatacaattataacttatatggcaaatggaataatggggtgaagacaagattcagtgggaacacaaagaagaacttcaaaaacactcagagaaaataatataaacccattattgaaaatagagtaaataagttacacttaattttagaataacaaatcttactgatctattgtgtccattgcagtcccttgaaaagcagctgccaaatgggattaaacataaaaaagatttattggtgaaaatgccagtgatagataatggggaggtagttggagaggtctgggagagccatactactgtggagtatgtctagcctcagtgaaggacagagggaactaagtttggtctagaagaaacttctttaagaaactccccatcgggcgtggtggctcatgcctgtgatcccagcgctttgggaggccgaggcgggtggatcgcgaggtcaggagatcgagaccaccctggctaacacggtgaaaccccgtctctactaaaaatacaaaaaattagccgggcctggtggcgggtgcctgtagtcccagctactcgggaggctgaggcaggagaatggcgtgaacccgggaggcagagcttgcagtgagccaagacagtgccactgcactccggcctgggcgacagagcgagactccgtctcaaaaaaaaaaaaagaaaagaaaagaaaagataagaaaaaaaaagaaactcctttagggcaattctaagaaagttttggcaagtcacccatcaaaggagccttacatatcaccaaaatgggcctgccttagcatccttgccaagagtatttactaacaagaatggatgacagcacaaccttggcacagaagtgatggtagattcaaagaccaactgctgtagctgtcaatcagtcagtaatgctccctgaagcagaagatttaagaggtacatttgcatagcttccatcttcatgatatttattctgatcctaagtaagctcagcactgataaacagtggtaaaataataaataataacttggaatttttcatgtttttcttactttgatcaaaatgtcaattattatgtcagaccctatagaggacccactgaatgaaaatctaaccctactactgagtaagagaaaatcaagaattattagatggttatctttgattttaattgatgcattaagcagacaggactcaggacacaattaggaaactgcttcatttttttttaacaccactgaacttcacacttgaatttagagctctagcttccctgaatccctgaacaacacaatgggtagatctatgatcacattaagatattaagaaaaattttcatttcacgttagtaatccaaagttgcataattacaaaaccagtcttacagccacaataaaagcttctccctttcccctcagtttaggcctgtcatgtgtttccaaaggccaccagtggtttaaagaagattttttttttttttaaatttccatactccaccttgccttccatcaatgtactgctccttgtttccctttgattcaaacatacacaatgggaggaaagaaaatgacaaccagggccatcttcctcaacatgatgctttaggccacctgtgtcaacatggactttgttgtttgcctctgaaaacttttactgggaagagataataacaaccaatagctcatttcactgcatgcttcaggaaattcctatagattaatttgttggagccaatagcccaaagacctgaataaacagttccctaattaagcaacagtttatgtatcaagaaactcatgtcagcttcctctctgaaagacccaccttgaaccagctcagcccagaatctcatttctaacacctccctgtggaaacacagacaagacttacagtagcattcttctttgtggcagggagctcaaatatacttcatttcgtcttagcagattttctggtgatcttacaggtttttcaatagggacattaaggtttgtgcatttagctaggacccaatctttgccattgaatatcctctgttattatgcactctgaactgagcatgtaatgtttgtgcccttcctccaaattcatatgttaaaatcctaattcccaatgcaatggtatttggagaagaggcctttgggaggtaattagcttatgaaaatggaaccttcatgtggaaactagtgcctttataagaaaagacacaagaggtttgcttctggtctctgtgctctctgctacgtgaggacacagagagaaggtggtcatctgcaaaccaggaggagaaccatctctaaaaaccaaatcggacagtactttgatcttgtacttcccagcctccagaactgtgaaaaataaatttctcttgtttgagtctcccagtatatggtatcttagtctgaactgactaagacaccacaggtgtctgaatattggttcttttcctagtggagactttggtgtgttttctagaaaccatcttattcccaccccagcccattctccctggaatccctgaactgaatattgcctgacagagttagcacacccttccatgacttctccctgtatcctcatcccgagttccctcctgctagggctccatcccagccagctttcttctgctagaatccatttgtcctggaggtggccctcttggcccataggaaacacacactcacagcactgcccatggaagtgtgatttggtcctagagcaggtgtcttccacccagctaattctaatggctcactgctttaagagtatgctagtatagtctcaaaactccaggagatacagaaatactcaattttctgccttgtcttcttggtgggcaaacaattccagagacatgtcattttcttttattagtgtgacacttttagtaaatgcatcctgtacttattactattttcattaggtaagcttgttttcttagctttatgtgtttcttcttctttttttttttctggaaagaaaatggagttgagagaggagttgaaacatgacatttcatgtcttgagagatttatatcccatcatagagcatttgatcatataattgctttagaaaatgttattttcagttagggattcattgaacaaacatttgttgagttcctataatataaaacattcttattatagagaatgagactaccttctgtcattctagccagccaccacactgtctatgaatgggcctcatcaccttctctcccttcccaaagagagggaagccagggatatatgtatttctctttgtgtgtcacatgggtagtattatcccacaagaataaaacttatttcagagtaaacctcgttcttttatgaatgtctaaattgcactcaaggggtataaggctcaggaaagctgtaaagctgtcaaggccatctctaatcatgggaatgtgactaggactgggatttattgtcatttaccaatatttgccctcagctttggggactctaccaaatttgtgacttatgtgaaaagcacctgtaaaattattttacataaagataaaagaaagctcattatataagctcaataatgagaaagtgacatgagtaactacactcctatatgaaataccctggatattcacaaataaagaatcatggtgaatataaccatactgtcacagaataaatgattttctacagagcttttcttctagatcaggagttgaaaaatgatggctggtgggccaaatccagctactacctgtttctatatatgaaattgatcggaacacagccacaagcatccatttacatatggtctattctgactttcatgctacagtggaagagttgagtggttcagacagagaccatatgtcccttaaggccttaaatattcaccatctagcccctttcagaaaaaaataaaaaagtttaccaacctttgctttaacatgatggaacttgcttcaaaattgttaccataatgctccaatttctggtaactataataaaggaacatcagttaattcttctcacttcttttctttggcttcatctacactttgtagcatcaactggagcctcaacatcagaataaatggctactgtgttcttttaaaatttgaagtgaacaaacatcaacaaaatgtttcacagattctcaaagtttttccatttgactgagagtgttgagttttgtgatgaataaacagaactccttctaggtttcacaaattataataatatgaataatatccagtatttattattatatagcaagtgcacagtgtgaatcatttaatctccaatcaatgctgtaaggcaagttctagtataacctccattttacagatgaagaaattgcagcacaggcaggttaaatatactttccagcaaaacaatgcggccaagtgatggaggctgcaaccacatttggtttacctctggaacatgtgctcataactaggagattgtcttattaactttttatatttctctgacatgataaatggctagttaatgaattagggaggaaattgatgaacagattttgccattctgtacttacagagcactgaagctcatagccacattgtcaaatgtttatctcagtctttccctaaagggatgtctcctatttacactccagtctgtgaaggatcctttgcttttctgactggtgtcatctacaacatgttattttgtccagaaacttgcctcatacctttagctttggctcaagggaagatactcatagcctaagatgcagaagaaaatatctgactacctgagttccagattccctctgttttgccatttctgaaggaccattaagtcagctgtctgtgtttcaatgaaaaagcaactcttttcaattatgtagaaagatgaagagagaatagaatattgaattggcagcctagagacaacttctagagctgaatccatcattccctatgtaaacttgggcaaattatcttatctccttgagcctcagtttccttatttgttaagtgagaatgttgtattgattaatttttaaggtatctgttgtttaactttaaaattagaaatagaattcacatttttaaaagtatgacttggtagttaaagaaaactaaaataatcaggcacagaaatgattttaatagattttttgacattatgaaggtaatacacttgtccctatatacgtaaagcaatttattgcaaatatattttgtgtatttatttttatctatgtataaatactttcaggattttccagtgatcttgttaggtcatagaagttgttcaccaccacagccttctttctctcactttcttagcctatgggccctctactcagggttcccccagcactttcagagtttgatgaaatactacacctggatggagtatggagtctgacttcctgagtgcttccccaaaacatgcttcaaccggaaatgtggttgaattacccttacagtgaacctgatcagtggtaacaggagatgctagaacaggaaaagacaagtttcccctttcctccctatcccatcaattactttgaggtgtattttttctttgcaacccctccagagaagtcggcaatgtttaacgagcatgcctgccaagtggcttgccttatacctcattatgaagtgatactcagggccactaacacatcgcacagcattgcattgcattttgcttgctgcacttccatgctccattgctacagccttgcacttcccaaacagggttagtccttaatgatcacctcaggttctgcattagtcaggttctccagagaaacaaaatcagtatgatctctctggaataatgagtgagaaagagagatggagagagagagagagaatatgaggaattggaggctgggaattcccacagtctgcatttgtaagttgaagacccaggagagctgttggtataattccagtctgagtccaagggactgaaaatctgggaaggtgatagtataaatcccagtataagagcaggaaaatacttatgtgtcagctcaagtggccaggcaaaaagaaaaaggggcaaattcctccttcctctgccgtttgttctattatggccctcgatagttgggatgaagcttatccaggttggaaaaggcagtctactgaatccattgatttaaatgctaatctcatccagaaacactgtcacagatacatccagaaatgttttaccagatacctgggcatcctctgattcagtcaagttgacacaaaatattaactatcacaatcattctaactaaaactacagttcgtgtataattctgttgatatgtgtgttatttatattacatcctccaggacctagcataaaccgtggcacatggcaggtccaaataaacacttatttaaatgaatttgcttttttgtacttgaaatataaactctttgagtaggtgattttcaccatgaaatatttggtagaaacagctgaagaggttcatagtaaaatgttcatataatgaactaaattgaaatgttgggacgaagggtaaagcctgtgatatcagctacaaagcttcagaatgaagaaacacagttcacagtccattttaccactgctggtagatactaaaaaagctgagttctctgttgtagagcacatagaatgagtcatacaaattgaagaaagatcttggaaggcccaagagataataaaacagaacctatattctagcaattgttcttgattatttgaaatatagtgaagagacaatctaattcttaccattatctcttagtctatgatgatcatgagtgggtgtgatctcaagagacaacgtaagcattttagaagcttgtcacaataatgtcatcatttttctctaattacaattgaacaggtcattataaggtaaacacaatcaaagctattatgtccatatgctatagcagaaaaatacttgctaagtgggtagctcgccattattttagatttaggaagtataaatatgctgattcagcggtcatccataacactttattcattcatggagtaatataatattgcatccatattgtgctatccacattccaaatggggtctagcatccacagttcagaactatcccacacagttcatttctaaaatacccatctaaagcagtggttctatacaaaaaataattttgcccccaggagacacagggcaatgtctggtgacatttttggttgtcatgaactggtggctgctactggcatctaatgggaagaggcccagggatgttgctaagcatcttacaatactcaggatggtgcaaacctagcgaagaagtatgctacccaactgtcaataatgccaagatttatggaaattgcaaaaagagcaaatactttgttaaagtgcaggaagcaaagcagaaaggtagagaatgataaaagaagatttttttaaaaagagtaacaaagaaataaaacaaacatgaggaatgtgatggccagaaataacataagatggtaaactagatttaaacaatttttggaaacaaattctctgaacattgccttctgctctaatgtgcttcttgtgcacagttgggctagtgttgccttcttagcagagctacactggggagtgtggaggactcattagcagaaaagtcatgactgtgaatatgcacagacattttaatgaaagctttagttactacagtgacaactctctctctctctctctctctctctctctctctctctctctctctctgtccactaagagattctattgattctgtttctctggagaactttgactaatacactgatataatcttacgagaaaagcaataaagattggaggacttttcccagaaaagataagtcttgacttaggacctaaaggatcatagatttagatgacagcgtaagatcacagaaaaggaacatcacaggtaaaacttacaaagcagtattcaagcagaggtgaggattctgatgcacagagtgcatgagaacaacagctggagcttgaactagaaaggttactggtcacaagataccatactaacaaacttatataatattacataagaaacaggagatcactggaaatttctaactaatcatttcagaatttccatctgtcatctaaatgtaatttactatttgggcagattttaaaatgagctcttttatttgactgttttaggcaatattttatttgagataatatttgcaattcactttgttcatgttgtattatctgaaatccttctggctaagaaaatattagaaatattttttagtttgaaagctatatcctactttctgaatttttccaacttgcctggaaggagcccttaaacaaggattgtatcttctacataatttgttacctacagagtagagtatcatttagtaaaaagttagcaagtgatttattcttctttcaaggaaatgcagtacttttgatataaattatttattaagtgtagaaaactggctttatatcttgtcctgatccacataacatcaacttagtattctccagtgtttccgatgtgtatgtcattgtaagcacataggtcatgcttactatatactttttgatagaaagaggaaaccttgtgcagatgaaagaatcctcttagaagagatgaatgttccatcccagaagcagaggtgtttcttattgacagtttcaggtatctttgtgtataaagggataaaagatatttcaaagaatgtatcacctctactaccaacttatattgctaggctttgattgttctatggaaacaagatcacaacattaagaaaccattattgtagacaaaaataaaatttaattatgaaaattggagtcatttgccttttcacttttaggctattttcaaaagcggtagtcaaaatgtcgtgggcttttaaaaaacaatatacatgctgtagcaatatattttaataatccataaaacaacacaaagagatgtgttgggtatttgatttgtttatatacataatatgacatctgaggtaaaataaagtttatttgtccaaaatcaaacagcaagccagtagtgtcttgtcaactcacgtccgtttttaaaactccctctatatattttgggctatatcacccttatgcaagaggtaaaaataaatacaaataaaagaacattcatcctcatcagagtaaactgtccctatctcctgggtaataaagtacctgttttcctcagtcaaactttctaagctttttaaatcaaagaaatattgagcattactttttcaaagatcttgctaacatagtattcaggtgttagggatctgtctattgacagtgaattacatttctacaagttttttttacatagcctggtaagaggcaggatgaatgttgaaaaatattcttagaggagctaacggcacccacgatgaagtatctaaggatatttactggagccagtggagcacaaatggaagaacggtgatatgaaagaaatagtgtggagagttgaacaacgttcatgtaattgaagagaggctcaacttaaattttggcacctctacataaaaacaaaagtgattcctgcagaactaagtatagagcaggctttcttgcatatgacacaatgcactctcaatagccatttagccgctacattttcacaaccaccaggcagagatttctagctattttgatattgacttaagtaattggattttacataacgttagaagaaacacaaggaaaaccagcataaagttaaggatatggaacattttaattttgctcctttatatgtcatgctcagaatattctgcatattgaaagagagtaatgaaattctgtaatgatacattctaaattgttaaagatcatagtaccaggccgatatgaggctcgggtcatcgattggaaatccattttatttctttaaatatcattctttatatcccaattttgtacaaattctattgtgaagacttagaatgtatttagtttgtccattgcccccatcctgcaaagatacactctatttcaatgggtgcacacaactatatatgttttaattctgtgatgtatataaccattttatttatcgaatttcattaacatcagctctgttaaaaattaaaatatgttcccactcaaaatacattttatgaaaccattaagactaagtataaacaaataaacaaacaaacaaaaaacagaagaaaaagatgtacttattgagagacaagaatgtttagtatcctctgaggtgaattatgaaagggtgacttaaaatcccttctctcagtttctacacattcttcttaagaaacctacttaatttttttttcgcttgtaaactgagttatcaggaatgatttttctgacatatgagctcatgaccttcaatgacctcaatttttttcatttttacaattgaataaaatcatctatttggcagaattactgtaagtattaaagaagataaatatgtatataaatatataatatataatatatatttaatacataatatatattatatattatatataaaatatataaatatatatttataaatatattatattaattattttatataattatattaatatttataaatatataatctttatatatatttatcttctttaatacttagatataatatatacatataatggaaggcctacaaaaatgttagggcattctcactattattttcagtcattttaatttatatgtcctaaaacataaaaattcattctgtcaatagtcaatatttatggaatatcatcttatggtagttactgtgctggctttgggtttaaaaagatgaaaagacgaccgggcacagtggctcacgcctgtaatcccagcacttcgggaggtagaggcaggtggatcaccaggtcaggagttcgaggacagcctggacaataaggtgaaaccctgtctctactaaaaacagaaaaattagccaggcatggtgcaggcacctgtagtcccagctactcgggaggctgaggcaggagaatcgcttgagcccaggaggcggaggttacagtgagccgagatcgcgccactgcactcccgcccaggcaatagagagagagagagaaaaaaaaaaaaaggatgaaaagatatagttcttaccctcaaaaaccttacatgacagtttaaaaaatagagtagtagaaagaaagatgatcctcacatgcttaagtgttttagaataggctttctctagctctagaagaaaattctttccaagtgctgtaaaattaaaatggacgctttgcatgggaatgttgttactttcccttctatgtgagctttcaaaactgtatccacgaccagctctacttgaagaatatgcacaccctctccgacactccgctttgttattagaacaacgggtgccagtgcagtttctataaagcagaagctttcaaatttatgtgaccaggactcacactgaaaaatacttttacttcagaacttctctcatctttctcagaaagcccaaacattcgatgactctaataatttctattttatctcataccatcccatttcagtccattctattctgttatttctcactaaaagaaatactgatcaccatcaacaaatagattttgtgaccaatagtacaagtttcacattttgaagacatttgaggtagagattacccacatgggagttactaaggtggctaattccacgtgctgtttgaccttatcacacaaaaaattcattcctttattaaaaactccactctctttctcagtaagtggaacaaaggtcccattaaaccgtggttcaactattaggtcactagatgctcacagaagaaatcttaagtacctacacattttttatcagataaaattgcaaactgtggactgaaagataattgaagacaaaattagagtctgccctaaaggagattaattgaaattaggaaaatacattgatgcaagtttaaatcaatgttttaaaaaataacacatcatatatcaacttacattttgggatccagaaagaatatcaatcaagtagatattcgagtttgaattcttcctatgaccttaacaaagcttaatctttatatagtgctttacagtcaattttttaaaaaatttatttcctttttttgacacagtctcactctatcactcaagtttatggcacaattacaactcactgaggcctcaaactcctgggctcaaccaatcctcctacttcagcctcctgagtagctgagacaacagtcctgtgccaccacccccagctagtatttttcttttcaatttaattttttgttgttgttgagatggagtctcactatgttgcctagttggtctcaaacttctgggctcaagtgatcctcctgcttcagactcccaaagtgctgggattagagatatccatcacagttctttacagtttatacagttatttcattcgcacaaattatcttatgaatgctatctattatgtcataaaaatagttactctttttgcaaagatattgaattatgacatttttcatatgtcataattagggaattatgacatatattccctaccaagtagggaactggtaagttactaatatttagaagtgaaaaatgtccctaagtgtaccaacgcattggatgaaaagttccttaaatatagcagttggttctagatccttatgaatcaatacagtagcaagatgatcagcttttccacacaatgagatgtcacaaactagatcatgactcaaagatgaaaattcaggagattttctgcccagagcatgaaatttaccatggctggaactgtaaatctgatgtaacgtctgtggcaagaatgggagagggagaaaaatcttggctggctctactgggactgaacacagcactggtagacagtggccttgcagaaagaattgtggcagtcattgtggaattgggaactacctcaaaaggtactaggaagagaatagaggaagtggcttggacaggaagactgaaggagagatgctgaggccaagggagcctcaaggacttagataaagtttccagaataacaaccatcaagccaggtattggaaaatatggttttggtgaattctcctttagaaagtggtctggggtcaggtgaggtggctcatgcctgtaatcccagcactttgggaggccgaaatgggaggatcacttgaggccacgagttcaagaaaaacctaggccacatagtgagatcctgtctctataaaaaacattaaagattaactgggagtagtggtgcacacctgtagtttcagctactcaggaggctgaggtaggaggactgcttgagcctgggaggttgaaggcgcagtgagccacgattgcacaactgcattccagcctgggtgacagagtgagaccccatcccctccctcacccccaaaaggaaagaaaatcgtctgagacaaaatatataatcccattcttatcctgtatgtcttataagtggatgtacatctacacaaaatgatttgagtgaatctatcacattgaccaaattactggcagtgatatgtcacatgcattaatatttagttaacttttccgggagttggtgataaggaatatccacttatatgttatgaaacttatacaatgtttcatttttagacaataaattttattttatcaaaagaatgactcaacataattttattaactcccaaaacattgaaataaaatatgtaccagggttaagcgtcttgtgcaaccaaaagaaaatgtatgcctaaaaagtacttcttcaaaaattctctaatatgattttatcactataaattaattgccactcaccttttctgaaaatcttttaaaaatattacgtgttgtattagtccatttgcattgccataaatacctgagactgggtaatttacaaagaaaagaggtttacttaggctcatcattctgcaggctgcacaagcataacagcaacatctgctcagcttctggtgagggaatcagggagctgacaatcatggcaaaaggcgaagtgggagcaggcattgcacatggcaggaaaatgagcatgagagaagggaggaagaaagtgagaagaggaaataccagactcctttaaacaacctcacctgaactcattactatggaaagacaacaaaccattcataagggatcctcccccatgacctcaacacctcccaccaggccccacctctaaccttgggaatcacattttaacatgagatttggaggggacaaacatccaaaccatatcattctgtccctaacctcccaaattgcctgtcctccttacattgcaaaacacaataatctgtttccaatagtccccaaagtctcaactccttctagcatcaactcagcaaaaagtccaaagtctaaagtcttatctgagactcaaatttcttccacctataagcctgtaagatcaaaaacaagttatttacttccaagataaaatggtggtataggcaatgggtgaatattcccattccaaaagggagaaatcagccaaaagaaagagacaacaggccccatgcaagtctgtaacccagaagggcagacattaaaccttaaagttccagaataatcttctttggctccaggtcctgggcacactggtgtgaggaacagactcccaaggccttgggcagctctgtcttcacggctttgcagggtatatagccagcgtggctgctgacaggttagggttgagtgcttctggctttttcagacatgggatgcaagatgcccatggatctaccattctgggggcaggagggctgtggtcccttcccctctgtgttattttgtctgttttgctataaagaaatacctgaggctaggtacttgataaagaaaagaggtttattttggcttatggttctataggctgtacgagcataacaccagcatctgaccagcttctggtgagggcagcagggagcttacaatcatggcagaaggggaagtgggagcaggcatcacacatggcaggagagtgagcatgagagaaaggagcaagagagcaagaggaggaagtattaggctccaacaaccagctctcaactgaactcattactatgaggaaggcaccaagccattcatgagggatcctcccccatgaccccaacatctcccacaaggccccctatccaacactgggaatcacattcaacatgggatttggagggaacaaatatccaaaccatatcacatgtattcaaaggtgctgtaggaagtcccaagaattaacaatctacactacttttcattaagacacttagaatcaaattaaggaaatagtagatgtgcacatagaacaatacagcaaatgtgtcagagagaaattctatctcaatcaatcaacgtgtcaataactttgagcaaccatcatgtgtcaggcacattctgcatagtgaaaaaagacagaaaagtttccggacctcagagaacttaccagtggcattatcagatctagtcactaaagtaataataatctaatgtgttcatgccagtgttggttttagtacacagaactgctgtcttggataacaggtttgccctggtcaaactcatgttacatctctgtcccccctttttgtttttttgagatggagtctcactctgttgcccaggctggagagcagtggcgtgatctcggctcactgcaacatccgcctcctgagtttaagcgattctcctgcctcagcctcccaagtagctgggattacaggtgcacaccatcacgcccagctaatttttgtgttttcagtagagacggggtttcaccatgttggtcaggctcgtcttgaattcctgatctcgtgatctgcccgcctcgggctcccaaagtgctgggattacaggcatgagccaccatgcccggccatctctgtccccttcttatctgtggtatttcatcctgacctttctctttgactctactaaattttaactaaaaacaaaataggctcttgtaaaaattaatagcatcataatttaaagtgagtctgggaaattcttttcactcactatacaaagatatagcccaaccccccaaaccacgtagataatccaagtgaaaacatagagaacatatacttcacaagggtctgctttgtcccctgcttaatacttaatgcctctacagagcatgattccagtctgtgccctaatcgtattggctgaatgcataaagaaatgaagagttggcacacttcagaaactttcccaagtcatgtttacattaagaatgacttgtgccaggctaggctcggtggctcacgcctgtaatcccagcactttgggaggctgaggcgggtggatcacgaggtcaggagatcgagaccatcctggctaacacagtgaaaccccgtctatttttgtattttttttgtaaaaaatacaaaaaaagaaaaaattagctgggcgtggtggcgggcaccagtagtcccagctactcgggaggctgaggcaggagaatggcgtgaacccaggaggcggagcttgcagtgagctgagatggcaccactgcattccagcctgggcgacagagcgagactccatctcaaaaaaaaaaaaaaaaaaaaaaagaatgacttgtgccagacactgtgctaaacgtatgtagtatctagttaaatcattacaatgtaatcaggtaagtaatattagaacgttcattttcttaaaattccatattttctttacaagtatgaattatgacagaaagtgatgttgttttgtttttgttcttaatagtgctaagcatctgacttatttcttgaaacctgttttgcaatatttgggtcttattataacctaagttgtcagtctctttaaaacagggatcatgtcttaaaagattcattttcccccatagcatccagcatggtgccttatgcttagtgaaattctaatgattacttggtgagttgaaatcaatcaaataatcagtcagtcaagaaaaacaaagccacaatggttgaatcattcaaaatattaataaagagaataaaaaaattatcactgcagtcatatctgtactcttggtaatatacaacctcatttggggttgggcttatataaacaattaggtgagggagtgcatgtaattgtgtataaaaaacctgtaagaaaccgctatattcagaaatacctaaaaccacagtcaaataaagactacaacatatattattgccaaaaatcaagggctatttgaagaaactcacattgtatttttcaacactttttatagatactatttctgcaactgatatttattaaagaactactctaatttaaactcaatacatttgcaagtcactttccttcctgctgcaccttttccccattttctaagacagaaggacacacaattattgatgtaaccaggtctccatgtaaggctatagccacagttgtagccagaatatcctatctttcttttcaataaaataatttggagagaaacagccatgaatatttaaaaaattcaagaataatcacaataaaacctatcaaattttaacaaattaaaattggtgtaaaattaaatacatgtctgccataggaacacagaaagaatgaaaaagaaaaaatagctgctaaaatctgcttcagccccttctctgcctccattctagttatctgttccattcctattttcctcctcaatgactcttctagtcatctgcaaataacccctgtgtctgatgtttactgttcttcattatcggacactattggccatcgccacttccactctactgaagtgctcgttcagacttcaccagtgccaccctcattattaaacgtaatagtttttttcatcactctgaaatttatctttcctttctaaactgtgtgctatcggactatctctctgctccctacttaaaacccttttcccttgaacttcttgtgaagtgtttatttgaccaggtatcgtcctggatctttccacatccatctcactataggttctctgcttctatttccttctatccagtcttcaaatgtgggcatctctcagaatggaatagcaggctttcatttacttaaagaatattcccttccaagatgattccatctactttcctgtttttcactatcaatttggcaggcaattaaaaaatttgcatttgaaattttaactgttcttccaagaaaagtcctaaatgtcaggtaattaattcataagcatcccttgccacatgcgttagccatcaatatctcaaattttatatctcaggcttgttaaaatttgaacttatggttacatctccttattggaattaatataaacgattatttcagttactatgactgagtatcttggtatcagtctgatatttatctttttgttaattttcgctaccaatcagaatcagattattttatactactcctaaaatgtaccacatagccaccctatcttttcatttaaattctactattttaaataggcctgtgtgacctctagctaggtaatgttccagtaatttccctgtttctaatttctttccacatcagcttagtctctgcattgaatcataaaagggagttggatgacaaaagagttgacttctttttttttgagacagagtctcgctctgtcgcccaggctggagtgcggtggcaccatcttggctcactgcaagctccacctcccaggttcacgccatcctcctgcctcagcctcctgagtagctgggactacaggtgcccgccaccacgcctggctaattttttttttttgtatttttagtagacacggtgtttcaccatgttagccaggatggtctcgatctctcctgacctcgtgatcctcccacctcggcctcccaaagtgctgggattacaggcgtgagccactgcgccctgccaagagttgccttcttaaaaagtcaaggtatcaccattcttccccttaaagacattcattgggttgccaataataatagtaacaatagtaaatatttcttgacaacttagtatttgttaagacacatgatacacactttacttcagaaaccaaaaactgtgggtcaaagtgggcctgcatcattcatcgattcactcatcactcatttgttcagagtatttatgaagcatctttgcatgttagtcactgttctgtgtttcttcaactgacatatgttgattgcttcagtatttttaaaaatttgaataggtttcaacatttttaaatggagagattaaaagatattttgcttaaaaaaaaaaaacaaaaacccgtgaggcacagtatgactctttcaggacagcaatctatttaatctgtagatattttctttcaccctgagatattgtttccattttactgcaggtcatcactttcttgtgaactgagcactaatgacattataatttttcagtatgcttgcactactttctattgtaaacattcatatttattaagccatagtctctaataaaactaataataacattactaaaagggctctatattttttaaaaatatgaatgagagaacaattctttgtgaaggaagaggatttctacctattgaatatactaaccaaatgtgtcgctgtggaaaatgaatgcgacttaagatgccatttgaaattgacatactgagactttgggtgtggctcccttttactcattggctattattgtttaagcatgcggtttgggatttgcatgctctttcttaattctcacaactcttcatattaggtactagaaatcagaaaaaaaaaaaaaaacacaaaacttgtccaaggacacatacctaataatctttcaagccagcactcacgcttagctctgttgaagccaaagcctgtgctttttcattagagttctttcgtatgataatctatgatttgcttccaagctacttttgctgattcatttcttcccgcactccaaaatgttcattgctttctccttatgtagtacttttatatactttacttttgtttgtaccgttgttctctttttaaatgttgaaacgttagactctatccaagcctgttcttaccttccttctcccagaagtggcctgctgttctgtgagagtggtgcttgcattatggtaaccatttttctctttgtaccatgggaactcatctgtgtttcctatgacttgagtacaaacttcattaagtcagaaagtcagcttgtggcagattttgtttttaacgtaatacagcatccagcccaattttttttttattacatagtaggtactccattaatgtttattgcattctacttaatataattagagagggttacctatataaacaatgtttcaagtaatgatttctacaatattgctctcctttctaactttatggccattaacaaatatggaattacttgttacatgacacaataatcattgtatgtgtaaccttctatttctttaagaaatagtgaatgggttctaatgggattagtgactgacattatatttggggtacatgcttagtacatgttcaatgaaatgtgaattattgcatcaataaataaatattgaaacttacaggtaatcataactagtttaacattgatggtgggggtcaaaaagtgtttgtacttttttgccaatccttcattgtttcactaaaggaatgagaatatggtatactcaaagtgatgactttctgagacgttctacaattgacttttccttatgaaagcagtgttgctaagcaacacttgtgcattggtatatttctttcccaaactttctatcacaaggacagcccaggattttttcaattgtaatcaccggactctcttgagaagtaaaccacaacatagccaccaagctatgcttcatagtttgcattgaatttgatggaagatgaacactccacttgacccccaaatacgcaggtgattgccagcagggacagttccaaagtgcaaatggagtatgatttatgacacacgtcagaaattacaccagttgctggttttcattatgttgcctaactctgatctgcatgaggtacctgccttacaaagggtatgcactggaaggctcataaaaaatcatgtgttctgttattgagacacaacttctgtttccttcaagtttaaacgtcaaaaatcacctggctgacaaatctctttctctagaatattgatgcactgtacactaagactctggcatgcttcctcaaggaagaataagaaaagattttcatattaaatgtttccattttccatgtgccctgacattatactatccccttttcttttagttggctaaggtgaaaaggctgcagtagtttcttctgttaaccaggagttaaattatagtagttttacaaattctacactgtttaataactttaagaaagaatttttgttagtgaattatttttctcaaactattaaaccgtattcttttccatgtgttctttttgttctttttttttttttttttttttttttgagacggagtcttgctcagtcgccaggctggagtgcagtggcgcgatctcgcctcactgcaagctccgcctcccgggttcacgccattctcctgcctcagcctcccgagtagctgggactacaggcgcccgccaccaagcccggctaattttgttttgtatttttagtagagacggggtttcaccatgttagccaagatgctgccgatctcctgacctcgtgatctgcccgcctcggcctcccaaagtgctgggattacaggcgtgagtcaccgcacccggccctgtatgttcttaaatatttctaatctgtcatttattttaatgggaattgttctcagtaaggtcccaaagattcttagcaaactagcagtgtagcataacacacaaagcacgtgagtcttggaaaactgggtcgtgaacatcttaatttgcaagagtttctacttcagtagaaatgtcaggcttcacagaacaaagattttaggcttagaaataatgaaagttttcgaagagttttattccaatcataaaatggctctcagttggtctataagtgatacttaaagtagaaactcccagccaacttcaagtgtttgggctccagaataatatgatgagaaaccagaagcagtcttacaacacagccaggagctcaactaggtgatgaggaagacagtgagtgaatggaaaggttctgaaaatgagtttccgaagtggtaagagataccccctggtgtacagaaggaatcactgcagcctttttttgctttggtcagcaacaacaaaaaatgacaaaggtatgtctataatcatatccatattggatatttatagggcttgttacacggtgaaaaagttatacagattctgtctacaaccatgattttttccccttcaaacgctgtcttctttataactctttaacaaacacctcatttatgttacctctactggtgaaatcatctgccctctagcaatgctgagccacttttagcacagagaaagtggactttatgaatcagaagatattgtaaattaggaaagcatgttctgtgaagggcagccaattctgtgaaagcatgttctgtgaagggcatgttctgtgaagggctgctaattccctttttcagagtttactctccttttggattatcctttaacattttatccttccaaagcctagctcatctcccatgaaatgccttattctccacagcagcaggattgtaaaatttaccttccttagggtttgtggcattatacagctcatgatgaaagagataaaggtatgaggaagatgagagaaaagtggcttccttacttgactgctccctcttcaccatattccactagattgggttccattattttaaccctggatcttatgaatttgccttcaataaagtgactttgttgttaattatctactcagattatggcctttgtttaacaaccaaacacaaagtattattggtatccataccatctaaaattaggtatactgaaaacaaatgctatagataacttcacaattgccttatgctggaggctccctgcatgttctagtaaaaaaaactgatgatttcaatcaagatccattttttctctctttaattcagggtcttagaactctattgagttttaccaaacttatactcagtcagtgaattactctaattaaccagtgaagacaacaaactcaatctaccatctctctcagcccacaactcatccagatatcactcctgatgcatgctttctggcaataacaagaagtagtaagaagagcaaacatggattttagatcaagattctaatcctaattttacaacctattggctgtgaggtcttggaaaagttacttagcctctctgattcagtttctttattcttacaatgggaatcataatgttttcagagtttatgtaaggcatttaaagtatgtgcttaaattaagtaatcaatggttgtcctattttggtatacaatgtttctattattatacttgtcacttctaagtttcttagcatatttaatgctagttaatctcatttctcttttctccatctatatttttctctctattaattgttttgaacgactcaatactttataaagtcacccatggacgtttcagtaccttttactcaaacagaaaaagcaaagaagcggagaagtgcaccaagtgagaactgacagagttatataaaattttccttagatctaaaaatttatacaaattatctagccctaatcatggtacttcacagtttgataaaaaccctactcatctaaacaggagtttattaaacttaacagaagctgatttttaaacactaaatcaaagacaaatgttgtgattaactttcagtgagcaattaggtaaatatgagaaactagtaaactccttgtttcctacccattgtatgacaagggtaaaagcaatttaacaaaatatttcttttgtttcctttgtacttctcagtttgatgactgaagattcaattctcttcctttagagactcaaagaaaatacacaggaggggatacatttgaaattataccttcaaaatgtcagtgacactaactgatgaacacttaagcagaaacaatcaactttaatacttttcaacacatataaaaatatattcctgttttatttctttcttgattttaggttagattcttaaaatcctttcagccacattatctgcattcaacaaggaatatattcctttcaatattgatacagatgaagattgacacaaatatgttaaatggcctgcagggatagtcttcacatataaggaagaaagtttaaagtcagatgtaaatacacatgtgcatttgttcaaacatcaacactttacttgatatttacaaaactgaggaatatttttgacacttattgtttctgtccaatttgttaaaataatattttgttgattttatgtgttcttctattttccatttcttctatttttttttaactttagaaacataccatactctaggaagaacttaggaaggcaaacatgttataaagaaatttttgtttgttttgaaagtgtttaatggaaattttagagaaaaaaatgagaaatttagtcacctaaacgatgtataatgaagaaagaaattagacaaataaaagaaagttggggagtctaagggtaatcctgacaactagtatctcatgaaaaaaagagacaagaaactcaaggagtttcatgaagtggaaaggtttttgtgcttcttccatatacattgtgtgtgtgtgtgtgtgtgtgtgtgtgtgtgtgtgtgttttcagatacatataaatataatacaaatggaatattcagtgtcgaattgcatgtttaaatggtggactttttacgacattcaaataaatttgtcccggttgattagatttgaggcccactagaataactaattactaagcatcataattcaagttcatcataaagcatatgttcacttgttttacagtaaatatcaattcatgaaaggaagaaaagtcttaaaaataaaaatcagttaacccaagttatttcaagtcataaatttaaatacctactagattcttcagtgaacgctgaagagcagttatttttatggttttgtaccttatgtaaacctggcgacatatatttgacttgaaacgtgtagcactttttaacagatctcataagctacctattagataaccagatgcataataagacaggcaagcagcattatacacaattctcttaagacaaaattaaaaatgcaaaaaaaccacatacattatataacaataagaattataaataagaatataataagtacgtaataagtatgcttagccctttttcctaaaacaagaggacttacatttttaaaaggtatttggctttattttctaagtgaaatttgaatgttcaaaaagaagttctgctcaatagtaatggcagaaataagatcatagaatgtaaccttgggtgtaaaacttgtgtaacacttatattttacagatggggagagcaagcttgatgacctatagaaacttatacctgccacgagcatcacctgtaaatgattacgatgtactataccactctttggagtaaaagttgaaaaaaatcatccactgataaagtcacttataaagtcaccatagattattgactggtgtttccaaaaggaaaatgagatcggtttttgttagaagattattgtatcagctacatcatttaaattcactttgaaagatacccagccattataatcaggtgactatggggacagcatatattattactaaaagcaagaaatcattcttcatttagaaggcccaatcaacaccaaagaagcatgattctcacaaattattgcctattgaaacaataataaatagattcaaaggaaacaatacagagggaaaaataatgcctcacatggtcattatgaaagttacaaattgaatactggagtgaaggtcaagtaaatgttaaaaagttagtgcacaaacacaatcaccatgctaagtgagctgcaggtaaaactgactttctaatttggaggattagtacaatcaaaagggtcaaataagttgtacatgatgccataatcttgatgttcatcgcttaaatctttattgagattaggttgccatttctttcaagtcttttgtcattaatatggatttttttttgccaaagactgaaccttttataaagcaagaaaagtattaaagaaaattaataaataaatgagtatttctctacatcgtataaaatcaatttgtttgatcatttgcttggattaatttattttcaatgatacagacttagttttaaaatagcattccatgctgctcctgagtattagatacacatttgctttacttgttttaaatattatggtcttttaatattttctaccactaagaataagaaaaaaaaaactgtccataccaacaaaatactcccataaagaacctgactatgatatgctcctcaaatgaaaaaaatccatcagaagaataatgtcctttcaataactccgtcacatcacatctcactcattgaaagcaccttgtgagtttatttcttccttcccatggaaacctcctttcacgtggtatctctgaggtcgaaattcagcagcctggaagactcaatatgatgtgaaaggtatccaagttgagatttattctacaacaattaaataccaaactagtcatattccaaaatagtttgaggaaaaaaatgtcatactttaaatatcctggctcacaaacgatcaacacaggtcccagggatggcacaaagatggttctaattcaatgaatgcggaatgttagtatcttcttaatggatgttgatctggttacagggaatatgcaccttacatgaccacagagaggccagaattttatttttatcctgtttgccaaggtctttatctctacagccaaaatgagaatggtgatttaaacaattgaagtcacagtactcaccccaaagcttttgtggaagcctagattgtcagtgactgcagctattagggaaatgaattcagctgggtagaaaaagccacatgacttgagttcaaatgtcactctctgttctctgtacaataaaattgtaaacccttagaagtggggctggtaaagcctacaggctttacatctcaaatagcacatgagcccctcgaaccctttaatattcccttgattccaggaagggagggcctcttgaatattaacatgtttgaatttagtattcctttaatcaacttgtgcctgtaagaggtaatgtttccattctcaaagccttggcttttatctgaccccaactgagatccccataaatttactccatgacatgaggtaatccctcaactgtatttcaaaagattgttttgcttcactaattatacatgatggcttctgacattctctgtaagaagatatttatgtaaacatcatggtctgtccaccattattcaaaaccaacttctgttaaagggttaaccacttaagctgagtccctgggatagacacatctcttaacctggcaataataatcttaagaatagtaagtgtttatgaatacttattatacgccaggaactttagatgttttgattcacttaacacgatcccctatgaggtaagtattgttattaccctcattttatagatggcctagagagctgaagtaatggaatgcccgacgtcatcatggctattaagtaagtgtgtgtgttgaatctgaatttaggtaagctgatttcagaggctatgcttttccacttcactgaattgctgatttatagagctcgccagaaggggaaaaagcagacacctcttgatggtgttttctacaacacacttagatcacctaaaggcttggggcataatttttgtagacatggtttatctttgttgacttcttatccatgtccctttgatctccaccctttgcccctgccacatccatcctgaagaggtcagtcactacgtggcctctcttgggggctaggttttattactgagtcactccatccatgtgagtttcttcccttgactctgcatctctggttccatgtgtgttcctctgctttctccttttcctctcccttttccctcccaatatgtgggtggaaagtattccagaagtaaatggtaataatgtacaggatggttcttttcccaaaccctcaggaaatgaatttacaattctcaccatgaccacaagtcttaaccctatgtgctaggcaaaggtttaattcagagaattttagtcactttagaaaactggataaattgtttgggaggtatagttaaaaaataaattagatttcagtagcactcttgttacttaactaagagtgtgcttatttatattctgggctgaatctggtatggaagaaaatatagacatttgctctaacttgggctctgtgtcattgacatttatgacttgtttttgtgaggctactcagtatctaagacttgtttctgtttaggaggagacagtactgtggctcccaatgcagaccttaaagaggactagataattcctttcattgctcccagtagcgatgtcttaggcatttgaattaagcttggctaatcaactgtctcaactggtcttggatttttagcaaagtgacacaaagacaaaaaacggtattcagaatgtatctagagcagaggtatccagaagcagaaaaaaatggcaagaggaatgtcagtagtagcagtgccccactctagtggtggctaaaaagaaaaatggcagtaatgacaaaaataatatcctaacaagactattgctgtgtcattgatttgggtgctatattagctatattgacaaccctgggtcgcatcccacttctcaacccagtctcccagatttcccacagttcgtcaaactacccatagtctcagtaaagtttttgcatgcttattaaatagtctgcctggtagacagggcttgtgtttcagtctcttcatacagtacagactgttgacataaaagttctaataaattactgtacttatattttccatttactctttgcctaggaagtaatccaggtgtttcatatgagctgtttaaatcttttgagcaaactatttcccttattattttaacatgaaaatagagcatataaggcatacaatttaaaatgggaacatatcaagcttaatagccatcttgcattgtaaccatgactgatataataaagtaatacatttagctttatgaatctgtaatgattttcaattcaaatgcattaaagttgagtaaatctagattgcaaagaagaagctcattattgagcaggagagaaagataagcaaacatcacattatatgataaaagtggttgtgagaaaagaaaacgtgaaaagaatacagttgaggatagggtgtttgttcatttttcatgaactatgatgtcagagtagtttttgcacattaagacttgcaagatgaaaaggtattatgatgggatgaaatagagacaccaggtattataaaagaataagtgcattatagtaataataatcattattattatggatattgtctaccatttattctgcctggccattcttttgtactttgcaaataatagatcgtttagtcctcaccacattacagggaaaacaatgagattattttcaacttgcggataacaaaaatgagatttaatgagataaaataaatttcccaagttcagagaattaatcctcagtcaagttagtattggaatccaagcagtttgacttgaactttgagtttctaactagtaagaatggcaccttaagatgtaagcaaaataaaatttgagttaggaaaatccttagtagagactactgtgataagagatgaaaaaacataaaataagaaagaagaattggtgatgcagacagtgtgccatctttgagaaaaatataaatgtcaaggttaaggggaattagtagccaataagtgaggagagggacataaatggataattattttcacaaaagtttaattttgcagcacttggtggatcaaaatgctggaaaggggtttgtagagaagcaaaaagggtgcatgtgtgggaagaagaatctattggttagaataagtttaagctcagctgtctatggagacatgcatttggaaacattcttctggtagataaatatcagaagaaagaccggtttgggagagatgccatatatggcaaataaaaatacagggtgcccagttaaacttgagttctgaataaataatattttgtttagcataagcacgctctatataatattttagacataccaaaaatgtttctattacttatctgaaattctaacttcataatttgttcattattgtgtctggcattcctatagactgggaatgtagattcgagcaccacaacttgcagagaagttgtcaactactgcttagagtaaaggaggttagctttaaataaacaaaggctagacagtgggttctctggtagaatacaaagctttatcttttccctctcatctactctctttgcgttataactttgaaatgttctttcactctgattcctggcacagtcatataacatggtgttaccagccaaaaggcagaattgatgatgttctggttctgagcatgaaagttcttgcaagaatctagtttgctctcatactcttgccatcttcatgagaacacagtaagtagatctagcctaattttagagtgagagattgatggagcaaagccaattcccacttttaccccagtcaacagtaagtcaaaccccagtcatgtgagcaaacagcaaggctatcttacttcccccagccgttggatggttgagcatgaaccatcttattatacagcttatcgttgtatgtaacacagcagtatgatggcaatagaaaatggaaacaaagtcaattataatagtgtcaaaataaaagtagcaataactaatatatattgattgcagactatatgacaagctatgctttgaggttttgtatgcgttactcatttaatcctcacaaggatcctatgaaattgttgctattgttaccccagttttacagatgagaacgctgaaatccaatgggtttaagtaacttttccaaggtcaccttggaaagtaacagagctgacagtctgacttaggtgaatttgccttcagaaagttcatgcctaaccacctagtgacactgcatctcaacaaaactttgaggatgacactggatttgccaataaagaagttgtttggaacatttactgcattagcttcaactaggtgacagactattggaggaggatggaagactgcactagaaatgaggtacagaggaagagagagaatgcagagggggtgcaagtattcctttaggtcattcagtgacatgaagaaaaggggaagagatgacagtcaacttaaagatagaccaagaggacactgaggttttaaccttggtttctttggttgtgtttttcataggactttgtgtatgtctgaagatagtatattgcactcagacttcctgggttgaaaacccagctttgccttgtataaacatccaactttaggaattttttagcctctctgagctttacttttttagcatacaaatacctcaaagagtttctaaaagactgaagcacagtatcccagaatatagatggtggttccaggtaggtcaatttcaggtgtcttcctacaaggggaaactccaaatagaaggataggtaatagtgaataaaacaataagccacaagataagaaagagaaaaaaaggaaaaatgaatgcctcaagtcttacaggggagaaggaaaacttctttctcagagacagttgagaacaaaaaatgggtgaacataaatctgcaaagtgagagagggagatcaaggtatatctctcctgatgataccatagaagaattttgactggcacctctacttcttaaatgtgaccagtgacatcctatgattaaaacattggaccttctttaggggcatttgcctcgccttcactgctcaggtgcacaaacttatgcttagagtcaaaatactttttaatttatcacaggttataatacctcacaactcactattgcatggtttgtggaagttatttaaattttccaaagtgcaatttcctcacctattccacaggaataacaaaatcatataccttataatgtgtgaagtttatgtgtgacatgtcatgaaaggcagaaaataaatatgaaccatctttactagctatattgcagttgcagttggcttacgtttatgcctgtaaacttaaaagagcgtccagcacattgcagaagttaatgtctacctatggaaaagataaataaaacatgatattaatttagcataaaagtagagcttttctacattttcatcaataaaatcatattattataagaaaaggacacaggattcaatgaggatactggcatataaattaataaccaatggtttggcactatgatagatttatttggcacatattttatgaaatactttctgtaagccaggcattattctaggccctgtggatgcacagatgagtaaaagagattaaatttctgcccatatgtcgcttccatgtcctggggagatacaaaatatgtgagtcaactagcaagtgtatagcatctcttggtgataagtgctatgaagaaaaggctatataaacgaccacaggccaatagcatctcagggaagacctctatgcaaaagcgacatttgtgcatgatgctgtcaagtgactgctggaatctggaaggcatctcaagagaagatacttaaattttttaaatttttattttactttaagttctgaatacatgtgcagaacgtgcaggtttgttacataggtatacatgtgccatggtggtttgctgcacccatcaacacaacatctcagtttcaagccctgcatgcattaggtatttgtcctaatgctctccctccccttgcttcccaccccctgacaggcccctgtgtgtgacgttcccttccctgtgtccatgtgttctcattgttcagctcccaattatgagtgagaacatgctgtgtttggttttctgtttctgtgttagtttgctgagaatgatggcttccagcttcattcatgtcccttaaaaggacatatctcattcttttttatagctttgtagtattccatggtgtatatgtgccacattttctttatccagtcaattcttgatgggcatttgggttggttccaagtctttgctattgtaaatagtgtggaaataaacctacatgagcatgtgtctttatagtagaattatttataatcctttgggtatatgggagaaaatgtttgcaatctacccatctgacaaaggtctaatatcaagaatctacaaggaacttaaacaaatttacaagaaaaaaaccaaacaaccccatcaaaaggcatgcaaattatataaacagacgcttctcaaaagaagacatttatgcagccaacaaacatatgaaaaaaagctcatcatcactggtcatcagagaaatgcaaatcaaaaccacagtgagatatcatctcacaccagtcataatggtgattattaaaaagtcaggaaacaacagatgctggcgagggtgtggagaaataggaattttacactgttggtgggagtgtaaattagttcaaccactgtggaagacagtgtggcgattcctcaaggatctagaaccagaaataccatttgacccagaaatcccttaagttaaattttgaagatgagtaggaactctttttgagaagtgaagagcagcgcatgcaaggtaaaggaggagctagtataaaggcagatatttaacaagattatggatcatttaggtaaatacacatattaattcagtcggtgtttgctgagtgtaatatcatacctgatgagccaactgcatggtccaggctcttctgtaacttgccttttaataaaatttccttccatatcagcatattgagcgcttcattgttttcatcataatagcagcattatgtgtcattccagggagagatataaggagtcattttgaacaaataacttttaacaaagggactaaagaaaggtggcaggttttgagttttggagatcagataggaatagatgaaaaggtgcagccatagtccaagtggcaaattatgaccatcagcattagataaaaggtaaaatgaaattgaatatatttataaagaattatatattttatgtatctgttaagaagatagcacaaaatagctaccaattggctatggagatgacagaggagacatgtgaagcttctccatattctgacttgagtggctgtagcgatcacaaattggttgtccttgtcaaccaattaaacaatagaatccacatggtctctacaacccatagtaaggtgcttggcagaaacataactaaatatataacaatattaagccttagaatctccaagttagtagctcaaaccatagatggattcatagctgcaacctagtcctctaaacttcagaggccagcagtgatgtctgtcaaacatatttccaataaaagggaatacttttattcagattaccaaattgctcaggtatcctgaatttttattctatacacatatccaatacaatattgattcaattgatctttcatagtaatagagcatttttaattgattaaagagtttttatattgatttgcattattagaggtttctgtgaccaatctgagtgcagtagtaagatgtgaccatgattattatgtctgaaaaaactttttcggtggaagaaagaaattttactttttgtatccatgtttcaagaaattattcattctccaattttatcctttaacattaatcttggatcctaaattatgcaatcactatgcacaagcatgactaggtacacatgacactattataccttcctcaaaattagaatttatagttttcatcaggaaattccccctctacttgcattcataagaattgtatgttctgtagtatattttaaattttgaaggtgagttctacagtatatcttactgatatactgtaatagaaatcaacagaaattcagttctcccagcagaactacttactgactgcaatttagaaatatctttcacgttcccagcttccaattctttaacaatctaaccaagaataaaaacatcttttgcaatatacttttaaaagccatgacattcaggagcatcacaaattatatttgggaacaaatcaaatttaacagcacctggacagtttagatcggaaatcaaaaagaccttcaagtaaggccagcacttaaacctaatgaggatgatttttgttgtttttgcttcccttttttggttttctaatttgaaatagaaagtgtggtgtagtaaaaaggtaacagatattctatcttcaaggtcatctttagtaggatataatgtctgtctggagaaaattaggttgactagtcacatactgtacattctaaataattgttctctaaaagcacccaccattttttatatgtttataaagggaagctttatatatgcttacaaccctcatagagcaaatataaatatgcagactaattcacacattgttaaattttagagttgacaaaggacaataaaaaaatcaaagatcgaaatcatacagaatagtaactacagttcctataatctacaggggctacgggctattctcctgtagattttttgttgttgttgttagaacataaaataattagctaaagctaaaaattagcttaattaaataattaattaactcttctattttgtccaaggaatttagaacttactaaaacttagattgcaaaacctcactagcaaaattaagcatttgccaagggtagctgctgaagggtctttaaatcactgtctttcagtttaacagcacttggacaggtattatatctggttctcatttcagcttcacaaaagatcaattatccatgctcattatcctgatctgattacattatatatatcaaagcttcactctgtgccccataaatacataccattattgtgccaattaaaaaataaaataaaataaaacatggaatgtgttctaaatgtgattgggcccttaacttatgaatttttctctctctttcttttttgatttctctcttgcttctttcttttcttctctccatttttttgcttccattgtttagtttcttaatttgaaatcaaaactatagtatagacaaaaaggtaacactttttctatggaaattatttataaatagtgttcctcttttagatttacaaaaggataaaaagattttctaagataaatagtaggggtccaaatttgaatttaagtggattcagacatgcctagtcatgtcagacaaactggtgaaacaggcttctcttgctactttgaaagttgactgagaaacattgcagaggacggttctatctgtgtttactgttggtgttccaagatgcctggccacgggtgatgaacttgtaaaacaagcctgaaaggaacggaagaattttttgggtgagaaaaaattcctagagaaaagagagccaggctccttgaacttgactgagaaatgaagccagagttgacagcccagaaggtttcttatcagtaaagcctcctgtgtattattctcatgtgactttgtgtcatcatccattcacgacaagccatatagactgttaagagcctctaatagggtgcaacaaaaaaatcagaaagcatccctccggcttatcccaatttttctttcttttaattttttttaatttttttacttttgtggggacatagtaggtacatatatttatgagttacatgagatattttggtagaggctttcaaagtgtaataatcacatcatgggaaatggggtagccctgtcctcaagcatttatcctttgtgttacaaacaatccaattttactctccaagttattttaaaatgtacaattgaattattattgacaatagtcccctagttgtgctatcaaatactaagtcattatttattctttctattttttttgcacctattaaccagccccagtcccctccccaaatacccttcccagactttagtaactgtccttctattctctacctccatgagttccattgctttgatttttagatcccacaaataagtgagaacatatgacatttgtcctcctgtgcctggtttatttcacttaacacaagaatctcccaggatgttggtctgggcaaaaatttcttgagtaatacccagtaagcacaggcagtcaaggcaaaaatggacaaatgggatcacataaagttgaaaagcttctgcacagcaaatgaaacaatcaacaaagtgaagagacaacccacggaattggagaatacatttgcaaactacctcccattttttgtacaacattgtgccactgggtttcagtgccgcatttcagtgggagttgcctcagtcaaatattggacaatggccttcagggagatgctaaatatagaatgtagttctgagtaggaaatgagtgaaacttcccaatctccttgccgcaacctcaactgaagggtggacaaaaagcaaacacatgcctggccagaacaggggtaccaagaagacgttcagctaacagcaaccaacgttgcacagcagaatatgagaatgacactatccttagtgattccaggaacacttgagggacacttgagaggggctgacatcctaagtaaatagacaggcaagttatttttatctcttgttaatatgatatcttatttgttctcaagcttccgttaacacagtaaactagaaacattttcatcatattccaccatggagccacagatctcactgcctcataagtaaactttttatagtagttgcaaaataaaatgttaaatatgacaatggaaacattgacaagaactaaaatatttatactttacttcatttattagataaaagcaaaatacaagtttttgctaggatcttgatagataacatcaaggtaatggtggtaagaaaaataaagcaaatttagaagaacaacctagagtagttatacatgaatatgatttcaggtgacggactccgaaagtaaaaagacaacaaatattcacagaagcagcttaaatctattttaaagatttaacatagctaaatatctctccattgatgctgaaggcaatagaatggatttttggaatgaaagcacgggacaggaccaaacacatttggaggtttctcctctgcttccaatttcagcaattcatttaataaaagccagagaatccgtatcctccattgtacgatgggcggcagcagccatatccatagcctccaaagccagagccatatccgtagcctccaaagccagagccatatccgtagcttccaaagccagagccatatccgtagcctccatagccacagccagaaccccgtctgcagaagctgccacatccacagccatagccatagcccaggccaccgaagcctccacagctgtagcccaggcctccgtagtagctgccgtagtgactcatggtgtcaggagtggtgagttggtttgttgttcaggcaagatcctgagtgtgaatgccagcatgtataggaggtttatataccctggtcagagcatgtgataaacatgtgcccctctttttgtgtcattccatgaattatacttgcctgaggcagctcgttaatctattgtcccctgacaacactcagtaagattgcctgagcttgtttggctacctagttaggttgtccctgagcttgctgctttaattttattagaagggattgctgcttcttcaaagtctaaaacataccaaaccttaaatagaattctttattaccagtcacttaacatcagtcacattaaaaattcttgaatttctattcaaatatattctcatcactagcatttttggacgtggttatagttgattccacaaaatttcaagaaatagccaaggtcaagactcttactttcatcagtttcttcataaaacacacatattttgtagagtgagaagcaagaaagatttgattcatctgtgtatgtacctgaaagaaacaaatgtcacctaatttgtagacttttaaaactttgatcatgcacaattgttatatttattttgggctttgcacaacagcatacaaaatatttgttttgttttaagaacatagcacaattgtagtcataagtggagagactcttacagggatcaaaagcccatctcatctggtctttccagagttttctatttatatctcaagtcccttctccattatatgttctaacctcactgttaccaaaaaatgaagattataatctgccttcatacagaattgtttctctttctctaccttttgtcattaattcatccctcttgcatcttttgctgatctcacttcaaatttcacccaacttcttttcctccacaattcattactataaccaggtaaaagtttgaagtaggtaaaatgttctggctacaacctatttactcaaatcaacattcattctttccatttagatctccatagtcaatatttgcccttgtctttgcctattctgtgcccatgttttttgttgtgctttgttttaaccgctttctagttatcttttcctgagaaatcaactagatcttctaagatattgattatggtgtttcttgtttaaaacatttttcaactcttcaaattatctgaaatttaaaaaaatatttgtgcaacttagattaacacgaaattctctaaatgtaagggacaattgtgaaaaatatagaaaagaaggagtagctctgtagggagagttgaccagtgagtccctcagctcagcccatagagttagaaatgcccaaggcttacctcatacctgattaagcctcatccagatgtacctatatcttgaaacttggaactccagaaaggtatcagttttatatgactataatcatactactaagatttttttgagatttatgagtaaccgaatgacacattttaaaatttttattttatttaaattttttattgatacatattttacatacttattagatacatatgatatttaattgcatgcatagaatgtataatgttcaaggtagagtaattgaaatatccatcactttaaatatttatcatttctttatgttgggaataaatcaagctctctcttccagctactttgaaatatacagtatattgttgttaactatagtcactctgcaatagaacttatacctttcatccaacttttatctctcctgcacccacacacccattccagcatctgatatctatcactcttttctctacattcataagattaacttttttatctcccacttatgagtgagaacatgtgatacctctctttgtgtgcctgtttatttccctaaacataatgactttctgttcaagtcacactttttttttttttacaatgcggtgtttctctgacctgctgagtgtcaaaacaaagtctcatatttagttggcattcaaaaatattatttgaatgaagcatatgactttgacatcaatgcaagggccatgaatagcataacatgagcaacttactggctattctgggagatgttgtaaggctgaacgcaagttccaacaagattcctgctgtcagagtagcatttaacccaacaatagccttcctctttgatgtctgtgttactgtaacccaatttcattccatttttattctccatttcagaaaatcagtcaagtgatacaattcatatatacatttctaatgaaacacttagaattatgaataaattacatagcattaagaatttcacattttcttgtgtagctctgtcagagcatgtgaccatgattaaaggctattttgtttgtttttgatacataaaactgtctctatatggaaataatatgagacacaaatgcgaaacttctatagtacaataaacactaaatgtattttcaaagaataaaacatatgactatgacatgcatagcttattttgtccactagccgtgtaaactagaaaaaaaatttgaagaatatgtaaaaaatctgatttattttctgtatatgcaagtgaaaaaagtctctgaaatttcctttgaggggttattctttttctatccatttattggatcaaaagtagatttggatcattattgctttttaagaactgttagctcatgaccctattttctactcatgttgataggtggaagagtgaaaaatgttctcacatttttcctggaagtaaggaaatttttgttataaattttctatcatctcagaaattattcaatacaaccttaaacagcatgaaattataagattgattatagtaataacaatagcagtaacaattatattgattactgcttttcagccccatggaaactatccctgggacattatccaaatgagaagaaaatgcttctagtgaaatcctattctactgggtcagacaatattgctgacctcccatagagttactttgctgtatttcccctgttcagcccattgttgtagtacacagaatgccctgagagcattgactcaaagaagaggtcatggcgctttgttttgttttttaacttagagtctgattttaacattgctcattggttagttacaatcagaagtagataaactaaaatttgattggtttaattctgtatatcgcaacaataaaaatgaaacatcaatgttaatgtaagaaaaagggccaaccttcataaaagcagttgagataatttagcttttcttacaactatgaccagaactttcagaatggttatctgacaacaatcaagaagaaaatgcataaaaggtgagtctgcaaagtatagtctaaaacctgggactcaggatggcatgattctgatcctagtcttggcaccaattatgacaaaaataacatattctgaatttctgtgcctccaaaattggaatacagcgttgcagaattgtaatgcctctttctgctccttgtgtgatttaatttttgtcctcattttattacatttggcgagcttgtacaaaacatctgtaggcacatatcattgcctgaaattctgttttataaaaacaatattgttttggccatttcttgaaaggatgaggtttcactgaaatttatcttcatatgtatatatatatgtgtgtgtgtatatatatatatatgtatagagagagagagagagagaagtatgtatacataatgatattgatataagacatatagaaatatataaaatgatatttgtataaaatatatacattatatacaatatatactatatatgtatgtattatatattttatatataatatataataaataaattaatatttcattaatatttaaacatatacttctatatattaataaatataaataacaaattatcaataatcatattgaaatataaataaaataatatttattattcataatacatataaatataaaaatatatttatttatatttaatatataaatttatgtaatatttaaatatatactcctatatatttaaatgtaatatttaaatatatactcctatatatttaaatgtaatatttaaatatatacttctatatatttaaatatacatacttctatatatttaaatattaaatgacacttttagtcagttgaaactacagaatattttgcctcataataatgtttctgtgtgtttatagtccctactgcattacaaatccttcagtataatgatgataataaagaacacaatattcctataaaaagacaagtgaaatgagttgaatgactacaattcacattttattatccagtttatcaaggacttttaggtcaggcttgttgtacatgcataacaaactagatgaaagcagaaaattatgaataaaagaagattatagataatgcaaagattcatagaaaaagagagttcacttctctttaagttttagggatatagattataagatttgtgagaagaaagtttgtttttattacagttttaatgatatgaatgttgtgatgcttaattttaagtgtcaatttgactctgttaagggatgctgggatagttggtaaactatttctgggttgtctgtgagggtttttccagaaggattcatattttaatctgtagactgagtaaagatcactcttaccagtgtatgtgagcatcatttaatctgttgaagacctaaatagaactaaatggggaaggcaaagggagtttgctctctgagctgggatcttcatcctctcctatcctcacacatcagcattcctggttagagcatttggtctcagattgaaacttaacatcattgactcccctgttctctaacttttgggtttggactggaagtactagaccagctttcctgggcctctaacttgcaaacagaagatcatgagacttctcagcctccataattgcatgagttcttccctaacagtaaatattcttctgtatatctatgtatatcctattgattctgtgaaatgctttatatgtgtgtccctgcccatatctcatgtcaaattgtaacccctactgttggaggaggggcctggtagaaggtgattgggtatgggggcaatgtctgatggtttggcatcatcctcctactgctgtcttgtgatggggttctcccgagatctgcttatttaacagtgtgtagcacctcccttgacctctctctcctgctgaccatgtgaagatgtgcttgcttctcctttgcctttcaccatacttgaaagtttcctgaggcctctctaggagaagcctgtgcagcccacagaactgtgagccaattaaacttatttactttataaattacccagtctcaggtatttctttatagcagtgtgacaatggactaatacagaaaattggtaccagagaagaaggacattgctataaagatacttgaaaatgtggaacgactttggaactgggtaacaggcagaggttggaacagtttggagagctcagaagaaaagaagatgggagaaagtttggaacttcctagagatttgttaaattgttgtcaccaaaacgctgatagtgacatggacaataaagcccaaatgaggtggtctcagatggaggtgagaaacttattgggaactggagaaaaggtcacacttactatgctttagcaaagagactggcagcaccgtgcctgtgctctagggatccgttgagctttgaacttgagggagacaatttagggtatctggcagaagaaatttctaggcagcaaatcattcaagatgtaatatggctacttctaacagcataccctcatatgcttgaacaaagagattatctgaagctggaacttatatttccagagcataaaagggaaacatagcataaaagtttggaaaatttgcagcccagccatgtcatagaaaatgaaatctcattgtttggggagaaattcaagcctgctgcagaaatttgcataagtagagaggagccaaatgttaatagccaagacaatggaaaaatgcctccaagtcatttcagagaccattgcagcagccctttcaccacaggcctggaggcctaggagggaaaaatgattttgttggccaggcccaaggacccactgctctgtgcagccttgggacatgttgccctgagtcccagacactcaagctccagccatcggtaaaagggctccagatacatctcaggctgatgttcccaagtgtgcaagcgaggagctgccaaggttttcacatggtgttaagcctgtgggtgcacagagggcaagagttgaggcttgggagctcctgcctagatttcagagggagtaagaaaatacctagatttccaggcagaagtctgctacaagtgtggagccctcatggaaaacctctactagggcaatgtggaggggaaatgtgggtttagagcccccacccagagtccctactgagacactgcctagtggagctctgagaagagggtcaccatcctccagaccccagaatggtagatccacagacagcttccactgtgtgccaggaaaagctgcagatactcaatgcaagcctgtgaaagcagccaggagaactataccctgcagagccacagaagtggagctgcccaatgccctgggagtctacccattgcatcgatgtggcctgggtgtgagacatgcagtaaaaggagattattttgaagctttaatatttaatgactgccctgctgggttttggacttgtttggggtcttatagcccctttgttttggtcaatttctccctttggaatgggagcatttacacatttacacctttacccccattgtatcttagaagtaagtaacttgtttttaaatcccttcaaaataacagatgctgcatcactagagcagcagcttagtagaagccagtgaatctatatcttctgtagcatgatgggcagcagcagccatctccacagcctctgtggccacaaccatatctgcatccttcatagccgcagccatagcccagtctgcagaagctgccacatccacagccgtagccatagcacatgccaccaaagcctccacagccatagcccagacctccacagtagctgccctagtagctcacggtgtcagagatagtgagttgggtttgctgtcccaggcaaggtcctgagtgtgaatatagcatgtttagggaacgcttatataccctgagcagaacatgtgataaacatgtggccatccttttgcagcatcccaatttatttatctactctatacaaataatcaatctgtttgttagcacaaggagagacacaaactcattaaaatctttgagctggcttagctgcatggttagaatgcccttgaacttattacattttttttttaagatggagtcttgctcttgtcacccaggctggagtgcaatgttgtgatttcagctcactataaactccacctcctgggttcaagtgattctcctgccccagcctcctgagtagctgggattacaggtgtctgccaccactctcagctaatttttatatttttagtagagacagggtttcaccatgttggccaggctggtctcgaactcctgacttcaggtgatccacacaccttggcttcccaaagtgctggcattacaggcttgcgccactgcgcccagctgatacattctttttaatgataaaatagtctgcatcttcaaagttacacaatttttaaaaaatcctaaattcttcatcactatgcatattgaattatttgtatttgacactgtgtttttattaaatgttttctcatttctcatttttacaccattccttagattgttctattttacctccacctagattcaaataaatcgatcaagtttaaaacttttaaatctagtaaagccttcaaatatcaaatatttttattgcgttgagaaattaaggctattcctccttcaaaagaaaaggaagtttttgaataaataaattttcttatcagctgtggtaaacacaaagtaatggaaaatatgtatgtagacataatataaaactactttaattttctatatcagcttgcaaaacattgttttggcttatcaatgtaacaaaatttattccagaaactgatatattatccaagagaataaactcagttttacaccagcctgaacagcagttcaaagatattctcttcaggtggggcacagtggctcacccctgtaattctggaggccaaggtgagaagatcacttgagatcaggtatattagtttgttttcacactgctgataaagacatacctgagactgggaagaaaaataggtttaattggacttacagttccacatggctctggaggcctcagaatcatggcaggaggtgaaaggtacttcttacatggtggcggcaagagaaaatgagaaagaagcaaaagcggaaacccctgataaacccatcggatctcatgagacttactcactatcatgagaataacaagggaaagaccagccctcatgattcaattacttccacctggatccctcccacaacacatgggaattctgggagatacaattcaagttgagattcggatggggacatggccaaactatatcaccaggagtttgagagtagcctgggcaacatagggagaccttgtctccaccaaaaaatcaaaaaatagccaggtgtgaggtgcacacctgtggttccagctactcgggaggcaaaggcaggaggattgtttgatccctgggaggtcaatgctgcagtgagccatgatcatgccactgcgctccagcctgggtaacagagtgaaactgtctaaaacagacacatacacacacacacacacacacacacacgaaaacaatcaagtctatttttatcgttacacaattttccagaactggctctaaataaagtattacctagaaactcagatgagcttggcttcatgctttacagataccacttttcttccacttcctactcttcctcactatgtatatatcagttctctttatcaaagcttttcattttatgctgcattcattcccaatatgtactagtgccaagcaggtatttcttcttatccatttttttctaatcagtattttacccttctacccatatatttaattttatcacaatatttttgtccttatgttttcttttccaattctgtgtgcctcatcttcctactttctctcaaccagcaaacataagacattatttatttattaaggttatacatttttaaacaatattttatatgactcttagagtcatataatacatctaacagtctcttaaaattctgatgccttgaaaatctcaaatgcgaatgtgcagtggtgaaataactgagataggaagcaaggatgtgaggagggctggccatgctccacagattttctgtgcttactctaggaagatagtaaatcaatcccaagtttagctccaccaaaatatgaccatatattggatttgggtccttaagcaatactttgctttacaagactttaaacattttgccaagagtattttttgttgttttgttttctgttttgctttgttttgaggtctataagcaacatttttgataatgcgttttctcaacttgatttgttcactattcttccaaaaaatttgttggataaatgaaagaatgaattttgcctgcctcaacatgtagtgcatatctaaggtggaatatgcactcaaaatggctttcaggttttaaatgaatatttaactcaatatttgccatggttgttttctcctttatcaaaattaattccacctttattttcgttctgaaaaagaaaactggacaatgtttaaattctcaatgagtagttgttgaagacaaacaataataagtaagtctaactactttaagaatctcatgaattattgggtaaacctgcaagattttctaaccctcatgaaaggctaatgtacattgctatttccgatgcatataaccatctccaagagaaatataatccaatagattttacaaattaaaggcaaattttattatttattacaaataaaatatatttaataaaatatgccctgcttttcttatgtattttcaaataacaaaataataagatatacttcattgtgatacacaaatacacacatatatatacatgcacatatatgatcatataatgctgtgaaagatatgaaccaaaacaatcaaatacttctgctttttttcctaattgaaaagtagaacaattatagtatcttttggatagcgattaactttggaaactgagaaatgtttatttttcaatttttttctcttaattcagtggactcaatgacttgcacaattatttctctgttatgctattttggggatatttttccaggaagatcatgagttaattgtgaaactcagatcctgtgttggtgtgtgaaataatgaaaataaagttttctactggccaaatgataactttgctatatcatgccatgactttgccatatcataccatgaagaccaagtaagataatagaaaagctagctgaaaaaattatctaaaatattttgagttaaatatgttaatccaatatgaaaaaaaattctatactaatttaatagttatgtacatcagttgttcaatgaaaatgtcaaataaattaatggacagaagagtatgatagggtgaggttataccaattacaataattcttggaaagaaaatacactttcataattaacctaggaatatcatttgatctgtcaccatttgcttgctcttacaataaaaagaaagaaattttgaatggatagaagaattcattacacattcagagtgagttgacaaatgtgatctgaattaaataaaacatatatgcttgatatataaatataaagacatgtttagtaggtattcctttttgttgttgacttaaatctgaatactatctaaataaaaggaaaatgttgaaaaatatcagattactaaccattttgcagttcttttcatttcaatctagaattattcttctttggagctatcgatgtatttatctatctgcatgcatgtttatgaggtatatgaaaaaacatagattctcaaccaaggagatagcttctctcattgacatcatcacttacgtataattgagtttcatgaacaaaacagaaccatattgtgtttgaaaatagaatgttttattggaagataaacagataattcaatcagctttaaaagcaaaagtagagaatactaggattattatagagatgtgggtatacagagaaaaaaaattgcctgaaattctgagatgttaaattcttttgtgcaaatagctccagcatgatctttgttgtccaatgattgaagtcagctctgggaaagtcctcttataatttcacacattgtgttgctggggcagtagtttaatagaatccagagaatccatatcctccatagtatgatgggcggtagcagccatatccgtagcctccgaagccagagccatatccatagcctccaaagccagagccatatccgtagcctccatagccacagccagaacccagtctgcggaagctgccacatccacagccatagccatagcccaggccaccaaagcctccacagccatagcccaggcctccatagtagctgccgtagtagctcatggtgtcaggggtagtgagtttggtttgctgctcaaggcaaggtcctgagtgtgaatgttgacatctgtgcaggcatgcttatataccctgacacatcacgtaacaaaacacttgctgcctattttagtgtagttgtgtatgttacacttacctgacccaatcctgacatctgaagaggccctcaaactcattaaagtgtttgagcttgcattgctgtcttctcatgctgtccctttaacatattgcatcacttttatgagaagaaattgctgtagcttcaaagtctgtgcataccagaccttaaatagacttcttcgtaggcatattgcattacatagttggtaatgctatgttttgaaattaaatattgcttcatctctggctttccttgaattgttttactcatttatgattaaataacagactttggttaaattcaatgctctgaaatttattatattcttccagaggtatctattacctcaggtgaggtccctttttaaagagaagcaaacatttgaaagactggagccatctgctcacctgctatgcctaacagtaaagaatttcatggggttaaaaaagttaaaataaagccatcattcttctattactctagaacattggccatcataaccaatattctctttttttggttttactcgtttaaaaaataaaaaccattttgatttaacaacacaacagtatattgctcaaacattaaagtcaaatcacagtaatcaaaaatctatttcctaagcagctttacaaactgttcaaaattgttttcacatcccgactcccttactggcatattagacatccaaggtgctaccaaaaatacagattgtattgccctcctcccattcattcctttttcctgatccacacaattatcctcttttcttttctttttttttttttttctgagacagaatctcgctctttcgcccaggctggagtgcagtggcgctgtctcggctcactgcaagctccaccacccgggttcacgccattctccggcctcagcctccggattagctgggactacaggcacccgccaccacgcccggctaatttttttttgtatttttagtagagacggggtttcaccgtgttagcccggatggtctcgatctcctgacctcgtgatccacccgtctcggcctcccacagtgctgggattacaggcatgagccacagcgcccggcctcctcttttcaatatattctttcagttcccattagggtctgggactaggtgagatggtgaaatatatgcaattctttttgcctcccatccattttcatttaatacttacttaaattcatatatatatataaataaaatcttcgatttttcagatatttttgcctttatgttacctttacctattgtgtgtttcttttttttcctaaaagaaaatagctaactaagctttactaagatgttaggtatttattaaagtgttagatgttaatagatgccatcgccaaagaccctggggaattcagtaagagactgttagcattgtgaatgtcttaggaatcccctaaaaatatgtataatataaaaagacaggatgaaggaaataataattaaagacaaagagtacctcagctgactctaagaatttagtcacctagacccaaggctgaccccaaaccccacccacatatgcccttaactttaagcttaaatatataatttcttgtttaatttttattactttgaatatactgttaagcttttgatgagtttataagcaattttgaaattgtgcatttctccagatagatttgctggctgcagttcaatgaccagcatgcaatagaaactcaatatataagtgttgaatagatgaatgaattctagttcttacaggtaaaaatcttacatctcatagaaatgaacaatactacgaatgtatccaacaataagaatttaaaagagaaattagctcaaatagctttctttctttagaggaacaaataacctatcatttcatttgctttttgttgctgttgtttaaggcatatttaaaaatacttaaatcttaagtatacaagttggtgatatttttcttatatttatagaccacctataacaagcacactctaattcccaaagtctggcgcttgactctaccagtcaatattattccttgtagagtaacaattaacatcctacataaggctttcttgttctgtacttcacttaggtggtctcatgtagtatactgaaacttcccatttccatccccaattcttctgtgtgtcactattaggtagatctctgtcgtatgtgatgtgaattttgttgttttaatttctgaaaagtagtctactacatgaatagagcacaactgatttatgattctgctctggtaggcctatatttgaggagtttagtggtttcagttttggtttggtttggttttttattgctagagtgaataaagaaagctgttggccaggcgcggtggctcacgcctgtaatcccagcactttcggaggccgaggcgggcggattacgcggtcaggagatcgagactatcctggctaacacggtgaaaccccgtctctactaaaaatacaaaaaattagccgggagtggtggagggtgcctgcagtcccagctactcgggaggctgaagcaggagaatcgcttgaacccgggaggtggagcttggaatgagcagagatcgcgccattgcactccagcctgggagacagagcaagactccatctcaaaaaaaaaaaaaagaaaaaaaaaagaaaagaaaagaaaagaaagttgttttgtacctttttataaagattcttttcttctttcttttcttttttttttttttcgagatggagtctcactctatcatgcaggctggagtgcagtggcgctatctcggctcattgcaacctctgtctgccaggttcaagcgatcctcctgcctctgcctcctgagtggctgggacttcaggcgtgcatcaccatgcccaaatacaaaataattttgtatttttagtagaacagggcttcaccacgttggccaggctggtctcaactccttacctcaagtgatccacccacctcagcctcccaaagtgctgggattataggagtgagccaccacacccagctaagatccttatttttagacctaggctttcctatacctttcttatagctgggataggaattgctaatttatatcatatctatacttattttatacattatatatcataaataacagttatatattatataatatatatttagcttccacagattctaccaatctcaagatgcagttattacatttaccagttgttaaatttactgtaccaacagggacgtatgagagttccagttgcttcacatccttacctacactaatcacttgcaaactctttaaaaaattgactatttttgtgaatacataatgatacctgattattgttttaatatggttttatttgattaataataatattcaacatctttacatatgcttataggccatttagattttttttgaagtaactgttgaagtattttgttcacttttaattgagctagtaatattttattattgattctcaggtgatctttacatatttgggcacaggatttttttcagatttatgtattaaaaatattttcattcactatgtagattttttcatcttaaaatggtgtctatacataaataaaatgcaataatatagtaaactcccattttaaaatctttttgttttatgtttaatgtttttggtcctaatttaaaaaattttgactacctctcacattgttatttaaaacttttgtctgttttctttaaaacttgttctatttttgtgatttttttaaaggcagttgatgatttgaatattacacttttgctaactcaggctaaagcaacataatcgcaaataaacaggtttcagatactgcctatttaagtctaccaaatatgcatctgttttggggcttatggtattgttgtaatgtattcttcctaagaaaagcaaagctattccctgaaagtaaagatattctggaatatttattttaaatccttcagcgatccataaaatcaataaattcaagttctaataatttgatcataccacagtgtactagaagtatcaaatgctttttctaagtagttaaattgattattatacttgttcctagctacagaaggcctttacctgtattgtgagaaaatgccactaacgatcaggaaaatggaagagctattatcatattctgtcaaactaagtagtgtagtcctcaaatggaatcaattgacccagtccatggagagtgttatgtactctcactagtctcactgaaagtgtgggtcttactagctggctgtataaacctattcttatgtttagtaaacaagtctgagtctttctaatgcttcttaattttttataccatttgaatttatcattatttactaataacttttatttagatctagatatgctagaaattaagaggttcaagattcatcaaaatcttaaataaaaagaggcatatactgtgaaaagtagactaatcttcaaaactcagctgtgattgttacacgaatataagaccagaattttaagattattgggaagcatcaagaaaagaaatatgcaatggaattgagagtcagcatttaaacaaatagacaaataaataaacagaagccatgtgtgccatttcaaattgagacaatttattgcaaagggaactaagcaattacacagttaggaaagtataggtagtggatgccagtagacacgatataggcaattataacataatgaatattcctaacatcttagatgctattttttttcatcttggattgatctagtgtgcccttgtttgactcaatatttggttaaattgaatgatcttcttatgacctctgatatcgtgtcctcagggtaggatttcagtagaattgagaatccatatcctccatagcatgatgggcggcagtagccatatccgttgcctccaaagccacagccataacccagtctgcggaagctgccacatccacagccatagccatagcctaggccaccaaagcctccacagccatagcccaggcctctgtaatagctgccatagtagctcatggcgtcaggagtggtgagttgtttggctgctcaaggcaagatcctaagtgtgaatggcagcacgtgtagagggaggcttatataccctgataagagtatgtgatgagtcacatgcgtacctgttttttttgtttttttgtttgtttgttgtgtgtgtgtctgtgtgtgtgttttaaattagttacttaacacaagtcattcatttttccctggcacaaggagaggccctcacaatcgttaaattgtttgagtttgctttgttgctgaattggagtggcccttaaaagttatcacaccacttaatgagaagaaattgctgtatctaaagtcttggcataccagatcctaaatagatttcttcatagctagacatattgcatattacaaatgaaataaaatgaaggttatatgttcctctaaagtcagatgctattggagctcatttctttgtcttctttattttgcccagactggtctcaagctactgggctcaagtgaccctcctccctcgacccccaaagtgctgagattagaggcataagccacctcacccagccttcatttcatctttaaatccctattgttcagatgtagccagagaattactcatgcctttgagaggcatagactttagaatttattcatcctttcagcatttatgtattgtgttgttactacaaggtaattattgcaaagaggcatgcaaattcagttgtgaaagcacaacatttggaaattacttataagactaaaaataactgatcactgtatttgagatcatataaggttaaaaagaacttaaaagctcaaagttgaaattaagggcacagctgaattaacaatatttggggtcacctgtggctgtatgtgactaaattcttggagtcaactgaggacttgcaccctcagttatttcttctgcctgttatcttgtaatattatacctacattttggagattctgaaaacatttctaatgttaatggtatcttattgaatttcaaagagcccttatatttaaattatctttttatatatcctataccttaataaacatttaacaacttagtggactagcatggtatttcctgagaagaaaaaggtgtatgtgtgtgtgtgtgtgtgtgtgtgtgtgtgtgtgtgtgtgtgtgtgtgatgaatttgatgaatttttgcatatgtgcttacactacctacaccaagcacactctaatctccaaaatgtttccattgttccattatggcaaatatcattccctagagataatcttctttccagtttttaacaacagcttcaaaagatcttgtcaatagtattctaaatttacagtctcatcagcaatgtagaaatgtatagtctcatgagcaatgtaagaaaattctagttgttccacatatttgataatgcttgtcatttttagactgtttaattctgactattcttgtgggcatttagtaatatccaagtattgatttaatttagtttttgcctgatgagtaatgatactgaccaccattttatatgtgtattggccatttagatattctctttttaaaagtacctgctcatgtatttcgtccatttttaagtgggtttgttatattctagcactgatttgtgggagctttttacatacttggatacaggtattttgtaaaagtttggttttgaaaatattttctgccaacatgtggtttgttttttcactttcaattaatgtttatatgtaaatagattatcttaatatcagataaaatttgttaatatttgtattttatgtttaatgcttttttgtcctaattgagaaacttttgattacctcacatcttattcttaatttctttgtcttgtcttttcagaacctgttccatttttatgaagcatcctaaatcaaaagacagtggctaacttgaatattaaattctcattatttcagttggaagctataaaatcacaaataaacaggtttaatgttatcacgctgcctattttgctctgtcagatctttgctcagttgcggggctaatgatcctatgatgcattttctctagaccaggcgacagcttttccttggaaggaaatgtattcttaaggtattcttttaatttcaacacaaatcaatacaatctaacaactagagatgtaataatatgatgaaattgcattaaactaaaagtggtactttctctagatggttatattaattgttcttcttttgacatagacagcctttcttcagactgtgatgccattgaccacttagggagtaaaaagttttcatgtgaaattctgtcatactcagtaaaactaaatagtacagccctgcaatgaagacactaagatatttttaccgagatctatttatggcaaaactgcaacatctcacttgaattgaatgaaagaattggtcatagcatctagctaagcaaatccatccataagttcagtaaacaagccagagtttttcaaatgcgttatgatttcttttaaatattaaaatattggatttgcactattaacaagttgtttttacacagataaagctacattagaaattgctaagttcaagattctacaacagagtgtttacaaatgaaattaaatagaggtggtcatttggccatgacaattaaactcttcagacgcacatgaacagagccttcgagatgcttcatgtgacaacacacaagaagagaagtaaaaaatgaatggaacagtgagcatggggaagtagaatgcctgatactcagtaaaactgggttctggtctgggctctccttgtcatgccatttttgatccttagcaaatgatttcactttttggagatcttttcccattcaagatggtattagggtaagcactgggaaaactttatagtagttcccctgcatgctccacagttcttttatattattttcctggcatttttgaatttgcttgactccaactaaagacattcgcttttatttcagtactgaaatatattattcttgaaacataataatatgttattgcatatttttcatgggcaagatacttatctgaaataccaacacgaaaaggcccacatttgcttgttaaaggttaaaagagacttggctagagtgtataaagcttcaggtcaatcacagccttaatatgaattacttcacaagtgatggcaatgatttctatatttcctaggtgtgttgcaaaatataaatgtgctgataatatgaaaatacaacttcgtgtcacaccacaatggaccaggaataaaacatgatagaaagtcacaaaagggctgggcgcggtggctcacgcctgtcaacccagcactttgggaggttgaggcgggcggttcaccaggtcaggcgatcgagaccatcctggctaacatggtgaaaccccttctctactaaaaatacaaaaaattggccaggcgtggtggcgggtgcctgtaatcccagctacttgggaggccttggcaggagaatggcgtgaacctgggaggtggagcttgcagtgagccgagattgcaccactgcactccagcctgggtgacagagcaagactccatctcaaaaaaaaaaaaaagtcacaaaaataagttctttttcagtgtatattcagatatatactttgttttatcagcacttttcttaccattaaaggggccatataaacatacattttgaacaaactatagaaatacatactcttcatgttggtctccagttaaatgtgaaagtttatgaagttggtatttcaaggctgaatttaaacactaacatgatctcactgaaagcattgaaatgaaaaagatatggtgaatatggcgcagtgttccaaagaaaaagccttctttttaattgagtgttatggttttcatttgtgcatgtacagtttacctttggacaacatgggcttggactgagtgaatccactcatactgagattttgttctacctctgccactcctgagatagcaagaccatcgtccccgttcctcctcctcctcagcctattcaatgtgaagacaatgaggataaagacctttatgatgagtcgcttccacttaacaaacagtaaatataaattctcttccttattattttcataacattttcttttctcttatttactttattgtaagaatacagtatataatgcatataaaacacaaagtatgtgttaatcaactgtttatgttatcagtgaggcttccagtcaacagtcggctaccagtagttaggtttctggagagtcaaaagttatatgtggattttcaactgcatgggggaatcagtactgctaacccctacattattcaagggtcaactgtgacctttgaatgtgaatatatacatgcacacacatacatacagctatatagataggtgcatgtatatacaaaattattttgttatatataatatacttctatatgtatagtagtttgttcttttttcactggatataattacaaataaccactttgccattttgagtcaagcaaaaaacaaaagtcgtgtatttgctttcagttagcataatttattctaaaaggaacagagaaaccccacagttataaaggtacaagtaagacacatccagagacataaagcaaagaattatggaatgataggtattcttaaacctcttagatgctaactgctcttgatcttggcttgatccagggtgacctcgtttgtttgttattgcagtcaggtttgggtgatcttcttatgtcccctcatgttaggttgtcagggaaggatttcaataaaatccagagaatccatatcctccatagcatgatggacggcagctgcggtatccatagcctccgaagccagagccgtatccgtagcctccgtagccaccgccatagcccagtctgcggaagctgccacatccacagccatagccatagcccaggtcatcgaagcctccgtagccgtagcccaggcctccatagtagttgccgtagtagttcatggtgtcaggagtggtgagttggtatgctgctcaaggcaagatcctgagtgtgaacaccagcatgtgtaggaggcttatataccctggtcagagcgtgtgatgagtcatctgtataccctcctttgctatagttatttgtattacgtttgatgttacaactcatttatctattgtcttctgatgtagggagatgccctcattctcattaaaatatttcagcttacttaatgtcttattcaggacacgattgaacttactgctttgcttttatgaaaagaaagggcttactgttcaaaatatgcacattccaaatgctcaacagaattgcctattaccaggtgtattacatcatctacactttatggtattccttttataatgaataatttcctttgtccgtcatcttccaaactgataacttcatattcaactaaatttacagctgttttttcaatttacagatgttaaatctatagttttaaaaagcaaacttatttatcaaggtgaggtcttcagaaagtgcctatatgcacaatacaggaaaacatttgaaatcaaaatgattttaatgccctgctgtgtacaatcgccaaaggactcaaaaaaagagagtgtatgctgatttttagcattttattcacaataacttttatactatttttgactttgcacaccagcttcagaaccttttggttgcaaaatacataagaattaatttcagaaattgagggcacaaaatccatctcctacgcagacttatcagagtagcactttagttttccattcaagtcctaaaactctcctttataattggttttattcaaagtcctggtaaaattgcagattgcatctgcctctgttttgcacattctagtcaattactttctttctttatcatttttcagtagtgtatatatgacctctatttcctttctcatttcagcttttattcttcttcccattttcttaatgtctatagaaacagccaggtagaagtttattgcatacattccctctgtcttccatcgacttatctcaacgcttttttttttctatctcctctttgtattcactgtaacatctttcctgatttttttgtttgtttgttttttgagacggagtctcactctgtcgcccagtctggagtgcagtggcaccatctcggcttactacaagctccgcctcccgggttcacgccattctcctgcctcaacctccccagtagctgggactacaggcgcccgccaccacgcctggctattttttttggatttttagtacagacggggtttcaccatgttagccagaatggtcttgatctcctgatctcgtgatctgcccgcctcggccccgcaaagtgctaggattacaggcgtgattctgatgttcttctatgtctatcctgtactcatttattctgaggtaatttctaaccactgcctactgatctgttaatagttcattaaaatatcatttttaaagctttctattttttgtacttactaaacatcctcaactccccaccccagcaaaaatacttagaaataatgaataagacctactatttgatagcacaatagagtgactatagtcaataacaacttaattgtacattttaaaatgtcttgagtaaaattagactgtttgttaactcaacagataaatacttgaggggatgggttttttaaaatgtactccaactcctatggctttctgaaatttaaaaggtatcctaaaatagaaattgtcttcaaagttttcaaaataaaggcaccatggtgaaatggcacagaatagagaaacatatgtaaagaaatttgccctgggcttcatagagttcctcagctgactttgttgaattagtgaaacagatacaacattgagaccactcttgattaatctccatgcagcacctgtctcttggcttcgacaactaaaaattcatttaatttacatgactttgaacatgctggtgagtttttgtgagatttataagtattttatcaaacataaatttcctaaaaggaatgcttcagttcttctaagcaacagactagggaattaaaaattgtttattgaagaaattctaagtaaattgacagtaactgccacagcaaccacaatctgtgcacaaccctgactacgccttagtgagctacctttttaagacagaaaaatagctcaataagtctttccatttatagagtaggatttaatccaatatttgctacatttcttttatccaaatattggttcattcttatttctcatctgaacttgaaacagtcaataagctgagttctcagtgagtccttttgaagccataaaatcacaaataactcaaaatcacaaataactatattaaggataccacagtttgtccatataaatcagcctgataatgtaagagtgtttaatagctaatttttgtttgggatgcataaacaatgcatacatctgagatataaaaccaaacaagatataaatggaaaacctcaatagccaaataagaattagaatgttttaaagaaatagactatgtgataattttccacaagaccaattaatgatcgtaagcagtaaatgattaatactaaaataaaatatataaatctacatattttatatacaaaatatatagaacaaatattttgtccttttttcgaagtgaacaaatagtaaaatgaaagcatccattgtaaaatgaagacatatattcatttgtagtgatattggttttatgctgaaagagattgttagactcaaagtcgattagacccaaagttgatagaacaatgatgttttatattttctccttcttttcacttttaggaagtttactttggaatatatgcttaataactttatgataatggataaggaagaagaaaatatgttcttacttgggataagtagtaacttttacctggaaagaaagaaagcttttgttataaattccaaagacttcgtttaactcagacacaaactaataatatataaaaatgtaagttacaaaaatatgttaatattgaattataccagcaatgccacaagtgctttttctcattataattatactgatctttcttttaattgcaaatttttaatacttttactcaggctgggaggatatttacctgtatgagaatagagcagtttcatctgaaattcagttatagggtcaaaattcctttaatgaaattaccaaaatttatctaccttgccctcccctgtgaaggtacagcatctaaagagagaaataacaagatttgtctgagttgtttgttcatatttcatctttacattgcataaacaaacccaagtatttctcataaaaataaataatcttgagaattgagcttatttgttctgtttttgccttcaagtaaagctaagttagcaattcagaaatgtattatatataacaaaataaaagttaacaagaaaaattttaaaaacaacagcaacaaaacatagttaatctaagagatgaaattagtctccatatactctgctccaaaattgaaaccatccacagtattattacaagaactttccagatggcattcagatttggaattatgcagtgaaagagactcagaatgatggactagagcattaggttcaggtgaactgctttctggtcttgattctgacacttagattttaactctaggcatcacttaactgttcggcatttcctcacctgtactatagggggcagcacggtacaatctgtaataatctaacgtttggtccagctctcacttcttttgtccttgtattattgaatttccccaggaaggggtccagtttcagtttctgcaaatggctagccagttttccaagcatcatttattaaatagggaatcctttccccattgcttgtttttgtcaggtttgttgaagatcagatggttgtagatgtgtggtgttatttctgaggtctgggttttgttctattagtgtgtatatctgttttggtaccagtaccatgctattttggttgctgtagccttgtagtatagtttaaagtcaggtagcgtgatgtctccagctttgttctttttgcttaggattgtcttagctatgcaggctcatttctggttccatatgaagcttaaagtagttttttccaattctgctgagaaagtcaatggtagcttgatgggaatagcattgaatctataagttactttgggcagtatggctattttcatgatattgatacttcctatcatgagcatggaatgtttttccatttctttgtgtcctctcttgtttccttgagtactggtttgtagttttccttgaagaggtccttcacgtcccttgtaagttgtaatcctagctattttcttcattttgtagcagttgtgaatgggatttcatttacgatttggctctctgcttgtctgttgttggtgtataggaatgcttgtgatttttgcacaatgattttcgatcttgagactttgctaaagttgtttatcagcttaaggagttttggggctgagacgatggggttttctaaatacagaatcatgtcatttgcaaagagagacaatttgacttcctctattcctatttaagtagcctttatttctttatcttgcctgattgccctggccagaacttccaatactatgtcaaataggagcagtgagagagggcatccttgttttgtgctggttttcaaagggaattcttccagcttttgtccattcagtatgatattggctatgggtatctcacaaatagctcttattattttgagatatgttccatcaatacctagtttgttaagagtttttaacatgaagggatgttgaattttatcgaagactttttctacatctattgagataatcatgtggtttttgtcattggttctgtttatgtgacagattacgtttattgacttgcatatggtgaaccagccttgcatcccatggatgaagccgacttgatcatggtggataagctttttgatgtgctgctagattcagtttgccagtattttgttgaggatttttgcatcgatgttcatcagggataatggcctgaaattttttttttttgttatgtctctgccaggtttggtatcgggatgctgctggcctcataaaatgagttatggaggagtctttctttttctattgtttggaataatttcagaaggaatggaaccagctcttctctgtacctcttgtagaatttggctgtgaatccatctggttctgggctttttttggttggtagactattaattactgccgcaatttcagaagttgttattggtcttttcagggatttaacttcttcctagttaagttttgagagcatgtgtgtgtataggaatatatccatttcttctagattttttagtttatttgtgtagaggtttttattgtattctctgattgcagtttgtatttatgtgagatcagtggtgatatcccctttatcattttttattgtgtcgatttgattcttctctcttttcttctttattagtctagctagtggaatatctaatttgttaattttttttcaaaaaaccagctcctggattcattgatttttttcatgggatttttgtgtctctatctccttcagttctgctctgatcttagttatttcttgtcttctggtagcttttaaattggtttgctcttgcttctaagttatttgcctagcaggaaacataggcaataccattcaggacagagacatgggcaaaaacttcatgactaaaacaccaaaagcaattgcaaccaaagccaaacttgacaaacggggtatagttaaactaaagagtttcctcacagcaaaagaaactagaatcagagtgaacaggcagtgggagaaattttttgcagtctacccatctgacaaatgtctaatatccataatctacaagtaacttaaacaaatttacgagaaaaaaacaaacaaccccatcaagaagtgggcaaaggatatgaacagacacttctccaaagaagacatttatgcggccaacaaacatatgaaaaaaagctcatcatcacttatcattagagaaatgcgtataaaaatcattatgagataccacctcccacctgtcaaaatggcgattattaaaaaatcaggaaacaatagatgctggcgagagtgtggagaaataggaacactttcacactgttggtgggagtgtaaattatttcaaccattgtggagaacagtgtggtgattcctgaaggatctagaaccagtaataccatttgacccagcaaccccattactgggtgtatacccaaaggattataaatcattctactataaagacacatgcacacgtatgtttattgcagcactacttaatagcaaagacttggaaccaatccaaatgcccatcaatgatagactggatgaagaaaatgtggtacatataaaccatagaatattatgcagccataaaaaataatgagatcatgtcctttccagcgacatggatgaagccgaaagccattattctcagcaaactaacacaggagcagaaaaccaaacactgcattgttctcactcacaagtgggggttgaacaatgagaacacatggacacagggagggaagcaacacacacgggggcctgtcagggggtgggaggaaaggggagggatagcattaggacaaatacctaatgcatgtgggatttaagacctagatgacaggttgataggtgccacaaaccactatggcatatgtatacctatgttataatcctgcacattctgcacatatatcctggaacttaaagtaaaatttttaaaaaaaagaaagaattgctttctggtgaatggtaattgatttaaaatctactttaccaaaacaaaacaaaacaataagtcttttggatgaatgatgactgtcatcaattaaagctgcaaagtgcagagggacccatttcttgattatatccagccatttattttccatttgcaattgtaaaaagctttagtgtcatgaggatgatgatgattgtaaaaagaaagcatatcattgaatgccacagaggaactgtgacataaaaaaactaattaaaacaattatttttaatactacatatattttaatcacctaatttgaaaaacttttagtaactttataacacaaccattttcatgataattctaagttaaatgacaggcaatagagaatagatcaaagaagattatatagaatcaagaaagccatgaaacatatattttctttcctggaagcttagagaaatattttgttctagcactcttcctttcttaccacaaaagggctgaataagcaacacattttgaaagaagaaatggattacttatatatttggactgcattgataaatataattgtatagaattaaaaccatgtaaatcccttttatttattaccataaacatatagttccaaaatgttggagttgaattttttattgttgttgagtttaaatctaaaaattatctaattaaaagctaggaaataaaaatcacttatatttggccaggcatggtggctcacacctttaatcccagcacttttggaggccgaagtgggtggatcagttgaggccaggagctcaagaccagcctggctaacatggtgaaaccccatctctacagcaaaaatacaaaaattagccaactgtggtggcacatgcctgtagtcccagctactaggaaggctgaggcatgagaattgcttgaaacttgaaggcgggggctgcagtgagctgagatcgcaccactgcactctgtagcctggacaacagagtgacactctccaaaaaaattacatatattcaaggaatcatcattcaactcagtctaaagttactgtccttttcatatatctatcattgtgtgaaataaatatttaatacacagatagtgttttagttttcacattgaaagttgagtagtatttatacttagtaacatatataattgagccaaatgaattaaacaaaagctatatttgctgtgtctcgagagacttcattaaagaaatccaggagaaaagatggagacaaacttgtacaattataaatgtactgaaagtcttaggtgctaattaatttaaacaaacagacttggcataattttgaaaggtaggtccaatgattgaaatcaggcttatcaagttcactcagggaatcagatgttagattgataaggaagaattttaatagaagctaaagaatccatgtcttccctaacaggatgagtggctgcagccgtatctatagcctccattgccacagctataccctggtttacagtgctaccacatctacagccatagccacatcccagaccaccaaagcctccacagccttagcccagacctctgtaatagttaccttagtaattcacgaggttaggagttaaaggcttggtttgctattgatggtgtgctttctaagtatgaatctccacacctgtgcagaggttttatatcctatgttatggatgtagtaaattattcagatttacctcattttcattactcaggagaaattacatgaaacacatattactggctctctgttttgtttagcatgcatggaattactttccattgcaatataacttttaaattaatttctagttcaattatgatttccctgattaaattgtatctataatgagaaatgttatttgcaatttcaaagactattcttacatcaggacacacataatctccacctaatgtaggcttccgagcatctctataatccagttgagcagctgtatgacatcgtcatcaaggtgatacttctttcctgcatatgctttctgtaatttctcatgttcatgactatgccttatcatttgagataagcagggccctaattttaccttaaatccatgcctctttcaaaactgtaatcacttaaatgtcaggtagttataatattaatatacaaacaaattttacttgacttctgtgcagtttgagtccacatggaagccatcttgttaaaagtgtctctcatgttttttataccagattaaatatatatttttctttgttaagggtttacacatgataccaatgggcatttgatattccacagcctggtatccacatttcatttttgagaacatactgtataataacttgggatgtatttgaagttttcccgggaagagatcaccacgcagcattaagataattagggtgatataaaaagtcacaaaacatttcatgttctgactttattctattatctcaattttggattctattgagatatatcaaaattctagttagaagcacaattccaagtcaaccaaaacattagtgctggccctaccccgggcaagactaatacaacagaatataaactagcctgattttctaaagtctttactaatgccaaataagataggaattaaatgttttctactgctttctgcagcaaaatacactcaaactgcatggaaggagtcaacaaattcctcaaaataaaagttaactaaaactaacacaagtagaaataaagaattgtaaagtgctacatctctttaaaaaattaaatttatgtaaaaacaagaaaggcaggccaggtatggtggcttgcctctgtaatcacagcactttgggaggccaaggcaggtggatcacttgaggtccagagtctgagaccagcctgaccaacatggtgaaacctgtctctactaaaacatacaaaaattagctgagtgcggtggcacacatctgtaaacccagctatgcgggaggctgaggtagaagaatgggaaataatgcccctgggaggcagaggtttcagtgagccatgatcaggccactgagctccagcctgggtgacagagcgagtgagataccatctcaaaaaataaaaataaaaataaaaaagaaaggcagacttctaacaaagaaaactgcaggtcaacatggtgaattctagcaacggttttaaaagaaatagtagtattttatacagttttttcctcaatctacaaattcaagatgcaataataaatgaaaaattggaaaataaaatgcaaaaatattagcaatattttcagacaacataaaatacaggtaaaagtaacaaagacatattccttgataattacaaattaatgcttgaagaaattcataagaactgttaaaatgagggtatatcatgtctacgtattgacaacagactaaatattcccaaattatatatttagcaaaatcataatcaaactgcctgtatatttacaaaatattctaaaatgtataaagaaatccaaaggacatagaatacacaatgcaatctttaaaaaataacaaagtttgacaacttatattaactgatgtcaagactgattatactagaatcatcaagagagtgcagtattgatgtgaggatacataaatagatcgatgggaaaaattagagtctagaaatagaccttttttctacaaagactctaaagcaaaaaaaaagactccatcaaatggtgctgaaacaatggaatattaacatggaacaaggaaataaatagccttaataactacttaatactatacacagaaattaatttaaaatgttttatagatctaagcatgatagctaaactactaaagcttctagaattttataggacagtgaaggcactggctatgaaataaaacatagtgaaattaattttattaacagtaaacagattaggagaatcaaaaactaagaatatatacattgatatagatatagatacaaatatcacctgtaaagatctgctactacctaaatgtcaacagaaaagcatcccaatgatttgggctcattgaaagcaagatgtgcaaatagccaataaataaaaagtgttaacatcattaggtatcagaattattaggaaaatgtgaattaaaaccacatttttaattccaagcacggtggctcacgcctgtgatcccagcgctttgggaggccgaggcgggaagatcagatggtcaggagttcaagaccagcttggccaacgtggtaaaaccctgtctctaccaaaaaaaaaaaaaaaaaaaaattagccaggcatggtggcgtgtgcctgtaatcccagctacttgggaggcaggagaattgcttgaacctgggatgcggagattgcagtgagctgagaacgcaacagtgcactccagcctgggcaacagtgtaagactcttgtcacactcacacaataacaaaaaaagaaccacagttggataacactactcacacattagaagtgctaaaatgaaaaacaaagtatattttttctaattaataagctatgatttagattaatcgtgatttatataaaatttcccaacaggttaatttcaaaatgtttctaacatgcattagtgcaattttcaactcatttaccatggtaatgcctgaattgaaattatgactttctgttagatttccaaaagagtaaatccaaggttttgatacatagcatagtacttcaatacattctgttaacatgcttcatttaaagcaataaaacagtgaaaaataacaagagtccatggaaaaggaaagcagtccccaaaagtgctggctaatgagcagattacattatcctcaccctacgaatgactcacaaggcagctagtcaaaacagaatcaatagtagggaatgtgtgatagggttagtagactctggttttgtgatataatatgaagcttcacatagctccttgatataaatttcccttaagtcattcagaataatggatgtaaccagaggccaagtgaccaaataaagttgtgatcaagactatttattattccaatccagggactttagcacctaaatattattgccataaattagagttcacaccaacataaattttgattaagaactcaaagtcatttaagtcatatttattgtcaaataagtaccttcagtgaagattgataagcctccttgggactggaaatccgggagaaggagactagcaactgggagagaccagttatgtctctccttcaaactcaatctatgatatttgttttttgttcatttaacaataggaataaatggtatccttgagaagaaaaacagttgccttcatttcaaatatcataaaataggagaaacttattaagatatatgactaaagttaagaccatattgcaatgtcacattaaacacatctattggaaaataattatagaggcatttcccaatgtaaaatacaccacagaaaatccagatgaaaaattagtacctttgagaatgaaaggagaaataactgttgtaggaaaatatccagtatttatagagtaaatacaaattgctattgaacagctagatatacacagacagctcttgaatcttatgccaacaagcttgtaaagccagtaattcatcttccctgcctgctatgagcgggggatatatttgaaaggacacaacatttgaagagttgtattttgttattggatcattttcccaagaatcttaggtcccaactccgagtagaaagcagaggcccagtatcttccataacaatctgggtggcagcattgtatccataaccaccatacccagagtcatatccatatcctgctctgcagaatctgccacatccacagacattgcaatagcactgggcatcaaagtcaccaaagccagaccccagcctccaacatcgatgccagaatagcccgttgtttagagttgaagtctgatattaaaagatacttaaacatctttagtgatagtgtgacaagtcttagatactctctatataacatttttaccaaagtgtacacatgaaacaatctcagtgatttgtttctccttatttaaggaggaggcctcatgtctattaaacccttggcttgctttggcagaacaattaatacttcccaactagtgctcttaaattttattactatttataacatactcattgtgagttcagatgttgtatttttcatgtctttgaggggcgcatgatatcatgctttaaaatgttattttgaattttttttctctgatggaatatcttaagcatgtatgaaaaagcagatggctagaatagcaagctgtggtaactctgaatttacgtactggtatattttgtgctcacagcacaaatgatattgtgattttacttttagaaaaaaaattccttagtgtcaatttaacacccatttcaaactcattcgtcttctctacctttcttcattgattatatcatgttttgttgtgggtatttgagacatgtcagcatctactacttctctctaaacaccagataagtagatctagtagagtgtgtattggatttctcatttatgcacagactgcctacaacctaaagtatgtattcaatatgtctttctgagtgaatgaatgtgatttatttgatttgattatatagagaattcccctccctcttatccacagggtatatgttccaagatccccagtggatgcctgaaatcacagataatactgaaatctatataccctatgtttcttttcctatacatgcaaacttatgataaagtttaattgataaattaggcatagtgagagattaacaacaataactaacaataaaatagaacaattgtagcaatatgccagcatcaggattcttgcactttggggatattatgaagtaaagtaagagtcacttgaatgcaagcactgtgatacgcccacagttggtctcttcattgaaagagctcttgagtaactaacaggcagggagtgtctacagcctggatcccctggacagaggattcctgtcctgggctggatggagcaggactgcacaagatttcatcatgctacttagattggcaggcaatttaaaacttatgaattgtttatttctgtgatttcccatttaatattttcagctatagttgatgtcaagtaactgaaaccaaagaaggcaaaactgcagataaagagggacacctgttcacaattctacatcaccatgacaatgtatttggcactctgagaggtagggtgtattaattggttttcatgctgccaataaacacatacccgaggctgggcaatttacaaaagaaagaggtttaatggacttaacagttctacgtggctggggaggtctcacaaacatggcagaaggtaaaaggcacatctcacatggcagcagatcagaaaagaaagctggtgcagggaaattcccctttttaaaacgttcagatctcctgagacttattcactatcacaagaacagctcaggaaagacctgcccccatgattcaattacctcccaccaggtccctcccacaacacatgggatttcaagatgagatttgggtggggacacagccaaatcatatcacaggggtttctgcttttcatctagaagttcactaatgctctgctttggaaaagtctaactttctttctctgatgctttgatatggtttggctgtgtctccacccaaatcttattttgaattgtagctcccataattcccatgtttcgtggcagagaccaagtaggaggtaattgaatcatgggggtgggcctttcccatgctgttcacgtggtagtgaataagtctcatgagatctgatggttttatgaaaggaagttcccctgcacaagctctcttgcctgccgccacgtaagacatccgtttgctcttccttcatcttccgccatgattttgaggtctccccagccatgtggaactgtgaatccattaaacctctttcctttgtaaataacacagtcttgggtatgtctttactgacagcatgagaatggactaatacacattgctagattagtaagccttcgtccaaatgcaagagcttatgtcttctttcctactctttaagcttctaacttcctaaggaagaacgttttctttaacaaagtttctctaactctgctaagaatgcaccaaaactggaattcttttagtgccacaatttttctatttaccctcatttaacactgaaaagaaggatcacctgaaacctgaagtgtatttgtaagagtcaatattaatattacttgtattccaaacacatgaaatgtttagcactcttaatctgtaactcttttgaaaaattaagttctatcaaataagcaaagtccaaatattccttggaatatcttgcctcaatcacttgaaagagtgatgtccaaggaagtaactctgggggaaaaaaaaatcccactccaaatgggaaatttaattttctaattgggaatgttctttatttttcatcagtggggagaggggtgaacttatgatttcattaaaagctttaatgaaacatcactacagagatggaatcaataactacatattagtaatttaagggttctgagataaatatgagttttgactataggatccacaatcatgctgttcactctgttgcgactgcagctgttgccactcctagttcttgtggaattttccaattagggttatgtaggcttttacagaatccaaaaagaacttactagaaaaccccttagattaaaggatctagaaattgagctttctgtttctagggtcaagaaacatgaacaaatttttcagtagaagtcaaatccacatctcctgaagccagaacaatagccaagacctccttagctagagcctaagcatcagatgctcccacactacagcaagtaccagagtccaggcctttcttgcctaagcccaggcctccaaagaaagtagtccatagtgtcacaagatctgtgagtgtggttgaaggttgtctaagttcctctgcatgtgaactaacacctgcagagttgctttgatagtccctcagtggtagatgtggcaaaccacactaatttacttcaagtttattcaagactgttgtaatatagaaatccaattagactattttcttaattagaagagactcaaataaggaagcttaaatttttaatttaattttcctactgagcttgctttccaccaaacctattatgcccataatgagtaaagttgatggactttgcaaagtcaaccatgacttaattctccaggaaattccacgtgagtcttcagggcatcaggtagccctctaattacatcacctgaggtgtggctcccaattcagtttatttccttgaccacttatttttctctagatcaaatgaagtgcattatttctctcttttcaatttctaagacacatctgaggtctattattccttaaagttgcaatgctatataatgtgcttcattgatatggcatttaatgtaacaagttttctgttgttcaaattttgtaaaacagctcatgttgcattttaacattatgtcctgaatcttgttttaatctttgggtaaaagtattttacgggtgggaattttgagcttcaaattctagtaggcaagcaataagactagtatttatttaatatttatgatttatgttcgagtaaaatcaagaaatagcacattttcatattcttctgtcaatgatacttccatttcttatattaaagagtagtaaaaaagtaaattgtttcttccaaaatattctttagatttacaagtttaaaacacttttataattttgctatgttttatttggttattgaagcaaaatatactttattatttcatttatagtttatttactaaaagatattattttcttcctccctttttctattctcccttctttcttccatcctttctctcaactttgttctaatgccatttacatacacatgtacatacatatacacacatatatatatgtatatatatacaataaaaggtgaatcatacctggttcttctgttacagagtttactattattaaaatcagtaggaaataaagtatgtgtgttataattcaatattgtcaaagttgtggtagaatctaaaaatctaaatatttaagagagctgaaggtggagcagctagggtgcccagccatcctggttttgctgggactgtgccagtttgagcaccggctatatcaagtgctggaaagattttcagcccaagtaaactgggatgattagtcacccaagaagtaactcatacatgaggcagtcaacccagaaaacttcctatgaacccaattatgaatgcattagatctttcaggaagaatgaataagaatgtaacaggttgggggtaaaaaaggaaaaatgacctttcataataagagaaaaagtaagtgtcatactgtggagccatgaaagtatgtagaatagagttaaataatgatagaatacagagtgtgtgagaaattagcataagatgaggcaaaaaaaaaggtcagatttttaaaaatttgtatgtccattaattttttctaattttatcatctaggtttgaagtcagcaaactatagccagagagtcaaatcctgccagtccctataattatgaatacagttttattgaaacacaggcatgctctttatttgtacatcatctatgactgctttcttactacaacagtataattgaatagttttgctggagaatatttggccagaaattctaaaacatttactgcccggccctttacagaaaaagtttgccagactcttactgcaggtaatcagaaagccctcagaggtatcctaggagaagtacataatcaatcttaccaagtcttctttatttaagtaaagaaacttctaatatcccagcaggtcatctactcaatatgtaattaatcagaatatgaattacttgactttttatcctttaagtgagattcatccttgaaataacttattgtcttcaatgtttccactttgtaactcttttcatacctctgtaaaatgcttaaaagagaggtcagagttggtaggtaatgggaaaaataagtagcctcgatatattaaaagagatttggcaatttgtttgtttgtataggcctaggggaaatagaggtaatgtaataatatacccaagtctgtaatatggaaccaacatgaatgagaactcatgtgaacaaaggaaattttgggaaaaaagcatctcaatagtttttcaaaattaactgttgtggaaaaaagcctctgagtatccaaacccagtgtgagttctattttattccccaaaggagcaactgagtccatctgtataaaatgacccactgtgagtttctgtgcttttgggggcatggcttaagaaggagctcattttgaagacagaatttggaaacaaatttttagcaaacaggaaagatgaagaatttaacgtgtatcagatattttcacttgacatttatcaggaaaatctccttactttaactcacagtgaacacaaaaatgagaggaacaacgaattattccttgtgacatggaaatcttcctttgaatcagttaagaatagcagtgaagggctgggcgcggtggctcacgcctgtaatcccagcactttgggaggcggaggctggcggatcacgaggtcaggagatcgaggccatcctggctaacatggtgaaaccctgtctctactaaaaaatacaaaaaattagccaggtgtggcggcaggcgcctgtagtcccagctactcgggaggctgaggcaggagaatggcatgaacccgggaggcagagcttgcagtgagccgagatcgcaccactgcatttcagcctgggcgacacggagagaatccaactcaaaaaaaaaaaaaaaaaaaaaaagaataacagtgaaattaaagaccatttgattttctaatcatctccagtatacacattgagattggtatgggcatagtctatgtaaccatctgaattgaatttttcagagaagcctaaattataaatattatgtatacctcatttgaggcctgattaaagaataatatagccacatgatgactctctaaagaaaattctatagatagcacaggatgcaaaagaaaaaactccctttcttccagttgattataatttagtaagggagatacatgagtataacctcatctaatgaaggaaaactgtaataagtgttcttgaaaaagcagtggattcaaacagaaggaaataattaattcaatcaacaaatggctacaggaggactcatgaaatagctaggacttgaaactcccctcatttgcaaagtttctaaggtcaacattccacctattaagggagattatctcacatttcacaaacagatacttttgttacatctatattccatcctgagattctcataacttcctaaacatttgtgaatgtttttgtaagtggtattttttcctcttaatttcaaatgtcaattgtttattgaggttaatggcaaatatatatgcacacatttgtatgaaagcaattgactttaatatatgggacttgtatcctgtaatttttctctgctcacttactactctcaagagtttcttctgtagattattttgggttagatatactagacaatcagatcatctgtaagtaaagacagttttatatcttcctttctgatctgtatatcttactgcagtagctaaaaccaccaacatgatgttgaattagaatgataagaaaggacatacttgctttgttcacatcttaaagatgaagtatgtagtttctcctgattaattagctgtagtttttttaactttatcaagttgaagaagttatccttaattctcagtttgagaaaagtttttgacataatagggaatcatatctttaaacaacttttctgcatctgctgatataatctaattttttcccttttagcttgttaatatggtgggtcacattttcaaatattgaatcaggcttgcatgcataagtgaatcctatctggtcataagattatttttaaagattgttaaattagagttgccattatttgattgggatttttacaacaaatatcagagacaatgttctgtaattttcttttttgctaacgtctttgattttgataatggaacaatattgtcctaatagaataaatttgtaggtgttctctttgcttctattttctggaagtctggaagtcattatgaagaattggtatttttttgttgttgttgttgtatgttttgtagaattcccagtgaaatcagggaggtactggaccaagtgcttattttcagaaggttttcaattattagttgagttacatatatatatatatatacacacacacacacatatatatatatatacatatatatatataatctattcctttcatgtgagttttggtagtttgtggcttaaaggaattcatccattttatttaagttattaaatttgtgagcatagattaaaaagaaaagattacatcttttgcaggaacatggatggagtggaggccattatccttagcaaactaacgcaggaacagaaaatcaaataccacatgttctcactaataagtgggagctaactgatgaaaactcataaacacaaagaagggaacaacagacactggtgcctctttgaaggtgaagaatgggaggagggagaggagtagaaaaaaactggttacctggtttagtaccttggtgacaaaataatctgtacaacaaacctctgtgatatgagtttacctgtgtaacaaacctgcactgtacccctgaatctaaaataaaaggtaaaaataaataaatttgtgggtatagaattgtttttaagtttcttattattcttttaatgtctataggattagtggtaatgacacctgtttcatttctaatattagtcatttttttcttaatgttttttcttgtctggcctgaccagaggcctagcaattattgatcttttccaagaaacagcttttggatttgttgattttttcctattgttattctgtttacaagtttagtgatatctgctttagggttaaattgttctttttctagtttactaaggtagactgaagttattgattgtaaggtttattttttttcttttttgataaatacatataatgctttacatttctaagtactacttttgctacatccacattttaacaagttccactgtcttttttcatttgtttcaatgtatcttttttcacgcgcacttgatactttaaaaaatttgtgtgctatttataaatgtgctgctttacttttcaaacatgtgggaatgtatctttccattattgatttctagtttatttattctgtaatctaagaacatactttgtgtgttttctattcttttaaaattgttaagatatattttatggcccacaatgttacctatcttgatgaatgttctgagtaagcttgagaaaaaatgttttctgcttttgttggatggaatgctttaaaaatgtgaattatagcaaattgatgatgtgtactcttcacaccatctgtattagtctgttctcatgccactaataaggacatacctgagaccgggtaatttataaaggaaagaagttcaatagactcactgttccccagggctggggaggccctaggaaacatacaaccatggcagaaggggaagcaaacatgtccttcttcacatggtggcagtaaggagaagtgcagagtaaaggcagggaaaagacccttataaaaccgtcagatgtgatgagaactcactcactatcatgtgaatatcatgcaggtagccacccccaggattcaattaccttccactgggtccctcctacaacacatgaggattatgggaactacaggtcaagatgagatttgggtggggacacagccaaacaatatcaccatctgtatctttactgacttcctgctatctcaagctatcaattattgacagaagggtactgaagtctccaattacaatattgaatttgccgatttctcctttcactttaatcaatttttgccttatatgtttttacactcttacgttaagtatatacagtttaaaattgttatacttttttaaagaattgatcctttaacctttatttaatgcttttttttctcttgataactttccttgtcctgaagtttctttacttgaaattaatataggaacctcagctttttttttttgattaatgttttcatggaattttttttaattcttttaccgcaacctgaatcttggtagtcagagtgtgtttttcttttatagtcaccatgtagttgggtcctgagtgtataaagtttttttttttttttaacccatgctggcaagcttagttttataattgctttatttatatcatttacatttaaggtgattattaatatagttagattgatatctgttatgtttgtgactattttccactcatagcgttaggtctttatttctattttcctatgttttcttccttttctggtattaaatgtataatttatatgattgaattttatctgccctcttgaaaggtatatcaattatacttatttctatttttatttttagtgtttcccctggagtttacaatatatgttcttaactaatataagttcaccttcaaataatagcatagcaattcacatttactacatgtacctactaatagaatatcccaaatttctttcacctctctttataacgtttcacttatctatattctcttttaactaataccttgtgactatttttgccttaactgaacagttatgttaaagcaattaaggatagaaaaattaaacaatttaccttctttcatttcttctccgttcatttcttctgttgctcctcgtttgtttacatagatccaaggtttttaaccatcttcctatgactgaaaatctttttcttaacatttcttgcagggaaggctactgatacttcatttctttgtttattgttgctgttgttgttgtttgtctgagaaagcatttattccctttccacatttattccctagccatccagaacagcctaggatttgttactgattcccctagacacaagagttccttccatgctttattcccatgattaatgtgaccctggggtataaaactcagagtgggctgctttggggggatccctcagctgtagtacaagtggggtgcatacagtgaagactctatcttctccaggcagcttttctgagacttgggggatgaacttacaatgaaccctaggcttccattgtcccttgctccctatctgtaagtaacaggtctgtttcatgtaacctattgcatatataatattctgtctcaccaggaaaggatgcagaagttacctttcacttgcacaaccaagcaaacaaatgactatgggagaaatgcaaaatccacatggaaaacatcaaaacatcaccctcttcttatataatgaagatttttaggaactcaatgttgtacctaattcagaataaatgtcatcagtcgtgacaaaaaaaaaaaggctctctgaaaaaagtctaatttgtagcatttgctgatctctgtagtataaatactcccatcacgttctctttcaacttagcaatgtgacgcctctaaacacagagctggaaagagatgctcaaaattgccttttgtgagctggtatgaagtggccccagcaaaccaatgaaaaaaaaatgtacatgaagggaaatgccaaacttactggaatttgaaatgtctaaattatttagtttccatgaatatcataataatggaagtctgctcttagcaacaaaccacattaactaaacaatgtgtcctcttaaaactttgatcaccttcaaagataaggaataataggtataaagtacatattttcatagggaaaattttttaaatgagagtatttttttaaatgtaaaactcaaatgcattggaatgaattaaaaaatgatgtcaggctttataggcttatgaagaaaatttactagaaagtgtctccggaaatatcacataagaatgaagtcagtggcattttattattgtagcagagaagacaatacctagcttgagtgatgaaattctaagtcagaaaagtaggtccacactgaaacaaatgtgccttttgcatggtgagatcttcattaagaaaagccctcagaaaaatatcactggtgatactgaagggcataaaaccttctatcagggaaagaatcctaaaattttgagttctaatgtgatgatcaattttttttcttttcagtagaatccagaggaccaataacttctatggaaagaggagcatggttttagattcccataagcaaattttattagggaatatgtgcggaaatatcatcaaagggataaagaagaaaagcttcatgctaataacacagtgggaatgtggatacctcgactagactggtgctaagattccagctaagggaaacaaatccctgcagatttggagaattggtctccattaggatgtcttcaggggctcatgactggctctgaaatatgtcactgataacagtgaagaaaacaaaagaacgaagatgaaaataatataaaagctctgaatttatttgcaatagactatattttcaaaaggagtgaagattaccaatatccttcatagaaagagggataagaatggtcacagccataaccaccatcaagcccatagctagatccatagccatagtccagactaccaaaaccaccaaggccatagccatgtccactgtagtccttgctgtactagtagctcattatgttgggggttgaagattggtttgatgttgaagttgaatttcctaagaataaatatcaccacccacgcctagacttttatattctctcgggggtgggggggcactacatagatatttctcatttttgtttctttcactaatgtgcaaaacagcccaagtatattcttgttttgtgatttgagaagttttttgttttttttttttttttttttgagatagagtctcgctctgtcacgcaggctggagtgcagcagcgcaatctcggctcactgcaatctccgcctcccgggttcacaccattctcctgcctcagcctcccgagtagctgggactacaggtacccgccaccacgcccagctaattttttgtatttttagtagagacagggtttcaccgtattagccgggatggtctcgatctcctgacctcatgatccgctggcctcggcctcccaaagtgattacaggcgtgagccatcgcgcccggccaatttgagaagttttaatgctactcatgtataattatatttacttatttgctttctctgaacttcttagtgtcagctcttacaataaaaggtaatgactgccaattcttcaaagcttatgactgtgcttaacatagcctaactagattacttgatgcaatctgacctcttgcatcatatctaattttgttagtccttgtctctcattctctccttttatcaagaaccaccgctctcctcctaatccagaaattacagtttcctacttattaattggcatgagtttgaaggtgttagagcacactagttgagagcccagtatatgcagcaatgcctgttgttatttcaaagtcctgtttctacccacttgagtgagattctcaatcttttaaaatatccattttcatacatgtgcaaagacaataataatttacatctctgttttcgacatttgctgcaaagccccctaagcatagagcaacaaacccttcataacttacctctctgtcagctcacaaatgtaattatatgaaagaaaaatatattacactgtgaaagcttatctccttatatagctttgagggtccttaaatgggagcaaattgaaagaagaaacgtaaataaagggacaatggccttttcattattgggaaaatctgtgcttaattctaaagtttttgaagtacaataagggagtatcactctaagaaggaaagacgttaagtcttttataagtaagcattaataagaaatataattcaaaaggaaaatatattgttaattgcaaaaatattggcaaaacttaaatgaaaaatgtctattgaggtgaataaataaaatttaaattatgtttgctatatcaataaagcaattttattggaaacatgtacagatatttttttccatggaataaggaagttagcacaatgttactaatgtagcaatgatgaaaattttttgactagattaatgaaattctaaatcagagaaatagaacctctagttttagcttggccctgagtatgcagtctgcagtatgattgcttcattaggggttcatgctaggctatcagaaaaggagttgttattaaagaggccaagactgtgcatggttttgatgacactgaaggaacaaaaaaagcacacaatcaacaaaataatgaaggtgtgaaggattacaagaccaacaaatatttgagtggaatgtaaggaaccaatttcttccatagaaagaaagtagttggtggccatgaagtccaccagatcctagttctgaccatcaaatcatcaggacccatcatagccccatttgctgcagttgttaccatcgaggcttacaggggctagagattagttttgatggtgaaggtgccttctgagtccaaaggacaccaaccacagaagtatatctataattcatttttgagaagagtggccaacattaccaagatttattgtaaatttccagagaaaaatgcacaaaacaagttttcagctgctttattattttaagctgtgatttaattttattacagtttatttcatttaatgtttttcatagtcagaattctcaatctcagcttctttcaaactctgctgctgctgtatccttactatttgacctttaaaaagtacttaaactatttctgtattcttgtctctattatgatgataatttttaatgaaatattgaatagttaaggatttaattatataaaatgcacccttaataactggaagctaaggaaacacacacacttattctctagttgtgtacagccgcagtgaatttacttgatagcaattattcccaacagaatcttcaaaattatggcaggatgatgagggcagagcccttgatagattgatagatgagtgaaaagtccttgtaagtcagagaccacaagaacattttacagttgatccttgaacaacatgagggttaggagcattaaccctgcacagtcaaaaatccacctacaactgctgacactctacgaacttaactacttacataagctactgttgaccacattttttatgttacatgtattacatgctatattcttacaataaagtaagctagagaagaaaaaatgttatttaaaaaattataaagaacagaaaactcacgcctgtaatcccagcacttcgggaggcccaggcgggtggatcacgaggtcaggagatggagaccatccaggttaacacggtgaaaccccgtctctactaaaaaatacaaaaaaaaattagccgggcgccgtggcgggcgcctatagtcccagctactcaggaggctgaggcaggagaatggcgggaacccaggaggtggagcttgcagtgagccgagatcacgccgctgcactccagcctgggcgaaagagcgagactccgtctcaaaaaaaaaaaaaaaaaaaaaaaaaaaaaacccagaaaacatatttactattcatttagtggaagtcgatcgtaataaagttcttcatctttgtcttcacattcagtagattggggaagagaaggaaaagatattggtcttgctgtcacaggggtgacaggggtgacagacaaaattctttgtgcaagtagatccactcagttcaaacccatattgttcaaggtcaactgtacatagtggcacttgttacacattaatcccaaagttcacagttctgtgttacttagagcaagaaagtagaaattgtgaagacctaagaattgtgaatgtaaattgcgaaaaaaatgactaaattcaagttagtcaagcctcacacctaaaattagagtatttgtcaagggtgagaaaaagtttaatagtcctaaaagcacttcaaaaaagtgtcttagcaaaattattatgaaaataatatccaaagacttggcctaggtaaaacaatcctgaaggaaaataattgttcgatacaaaaatatattgcttagatattgcaacacttatataaaacaggttcatcttaatgcatggacaagaaatcaaatttacaatggcaataaaatgtttattagaagtatgaatagaattattaccttaaagtaaggaaagtagcaccattttaataagcctcaataatgagaaaaatcagcccttagtattgaaccttgttccaggatgaatagttttggtgggtttttgattcttgtagacaaagctgggctgtaaataaagtagttgagattaataagtctaaatagaaaattacattgataacattaaggaaaccagtagaatgcttagactttattaatataaaagatctgaggttcataaaatatcagaaatttattttagtagaataaaaggtacaggtacgtttcatgaaacaggtacagtagaaaccacagccatatgtactgttaccattaatccatacttaggatcagagacagagacagaacccaggcgaccacagtagattcaaagaagctcatgatgtcaccacctacgtgagttttttgtttgtttgtttgtttgcttgcttgtgattttttggggttcttttttttttgagacggactctcgctctgttgcccaggctggagtgcagtggcgcgcgctctcggctcactgcaagctccgcctcccggggtcgcgccattctcctgcctcagcctccggagtagctgggactacagcgcccgccatcacgcccagctaaattgtttttgtatttttagtagagacggggtttcactgcgttagccataatggtcttgacctcctgacctcgtgatccatccgactcggcctcccaaaggtgggtcttttaatattctctcatggagggaagaggccaatcatgtccataaattattatttatggtctaggtctcaatgtttataaaagctccccagagggaatggaaaggtggaattatttttgcgtgatgaaggagtagtgaaaacgttattgtggctatattttagttaatgaaaaagacaatattgggagataaagttaggaaggggttagattatgcaggagctccagggcctcgatgataattctttaatgaaatttcaggtgtaatagaaagacattaaagatttccagttaaggaagtgatctgattgacaacttgctactgtgtggttcatgaattgtaagagttctagaatagaagcctagagtgtaagattattatagtaattcaggcaagagatggtggtagaccctatatggggcttgttggtggataggacacagatgagggggataagaaaacgagaaatgcagagtaacaccttagttttgcgcttaagaaatttgttgaatgtcttagatattatatttaacaggaagcttgggtataggcagattgcaaaaacatcaagagttccttttctaaaatattgaattgacagagattacatatcttcagggtattcagtgtgatggtttggtatatttaattttgtataagcacactttgtgtaatgattaccacaatcaaattaataaacacatccatttactcgtgctatcagtttggtccccagaacttattcatcgtataactgaaagtttgttcactttaaccaacactacccctttcctctgtgcttaccccgcacgctttgcaaccaccattctttctactcatgggatctatcaaactttaaaaaatttcacttatactacgtttttctgcatctggattatttcacatagcataatgtcccccaggtttatccatgttgccccatgtggtagaatttctttcttttcaatggctacatttccttattcattaatccatccatgaacacttagattgtggccatatcttggctactgtgaataatgctgcaaggaacctgaggatgcagatatctctttgagattctgatttcatctcccagaagtggaattgctggatcatatatatggtagttcaatatttaatttttgaggaacttccatattgttttcgatggtgactatacaaatttacattccttccatcagtgtacaaagcctcccttttctttacacctttgcagtgctagttatctttgcccttttggtaatagtcatcttaggtggtatctcactgtggttttgattttcatttatttgattatttacgatattgaggacttcttcatatacatcatagctatttgtatgtcttctttggaaaattgttcatgtcctttgcccattgtttagctgaccaaaaaatggtcagctaaatttgctattgaattgtgtgggctccttatatatttaggatatgaatagtattccattgtgtatatataccacattttctttacccattctttatctattagaaacttttaatctagtaattctgttacacaagtttggtagcagaagttatgactacagccacatggagctccgtctacctaattaagtctttcttattaagaaaacaaaactcatagtgatcattcatttccaagtccttaataaatattatcacctgaacatgacaatcctgtgaattagaaccagtcccacataactatcaataccttgtgagataggcgctaaacacaatttggaggacagaaaacgaaaacttacagaggctaacttgtccgagttcacctagttaggggatagtggagccaaaactcaaacccaagtctctttgaagccaaacctttgtgttttagtgctcatctatttttttctccgttataatacacaaatatggatgtctgaagacatggtgtaatgctatcatcttatggaaaggttgtcttaaatatgcagctgttaaatatttggaccaataaggtttatggttatcttgcagtctgcagtctactttgtcaagaccacttgggggactcagttttgtttttgttttgtttttgttttgttttgttttgttttgttttgttttgtttgagatggagtctcgctctgttgccaggcgggagtgcagtggtgtgatctcggctcactacaacctctgcctcccaggttcaagtgattctcctgcctcagcctctcgagtagctggtattacaggtgcccgccaccacacctggctaatttttgtatttttagtagagatggggtttcaccatgttgaccagcatggtcttgatctcttgatctcatgatctgcccacctcagcctcctaaactgctgagattacaggtgtgagccactgtgcctggcagggatccagttattgggtgatcaaaatagtcattaaggataatccagaaaacaaactacaaaatatctggagtcagactacagaccagactgtggaagctgccacatccaaaccctcagtcagagcaaaggattctgtagaaatttctttaggtgatgacatcagacattaaggatttcgtttgataaacagggcagtagctgttgtaagtacctatgtggtactttcatatccactgaagggtgggtttaagaatccataaagatgtgtcaagctctcctttcaaataaaaatagtacaaacaagtcaataaaaccattcctttcataactgagaagaggtcgttttgaacttgctcttaaaagcattctattagttttctttctgcttagcttacattcttcaaaagaaacctcagctatggtaagaaatgatggttatatctccaaagcaatcttttctacatttagaatttcttgaatagctttcaaaacatcaagtagttttgtaaaataacctgacattttaccaaccattaattacattgccttgctaaagtataaaatcttgtacactatctacattatttttactttatggctaaacgaatagcatacaatttattcaagaaaattgtctacaaactacaaaaattgatgcaaccaaaaaactatgttcctctttgtaaaagtgatgaaaatgttttaatctgataatttccttcgtggtcatttagcggtttttaaaacatgtattctaaactgtctcaaatgatttcaaatgtaaaataaataaataataacaaagcatgtaaatcaacagagattgagtaaagggaaaacaagttcaaattatttaaaaacagttttcaaagtacacaattcatgaatggcattagcattcatcaggcgtatctaagtgtccttaattatggaaacgtttgcaaaattatttatctccttgtcctctagctttctcaagtgaacaataacataaagtaattagaaagttattttctaaagttatgaagttctgttcttgtgaacctttagagaatctttagagtttaatacacaaaatggtaaatctgtggggataatgactctcactgttagaccgacaaaattgttggaagtattgccagtcgtgaatactaatggccttgtacatgggaagtggtagtttctattattaaatcaaaaggcaggacaaggtgattctgcagtgattcgtcaaccaatggagcatatccaataagaaatttgttaaaacaatagacttgcttacatgtatagagacgaggctattgtgctagaaatcttaacgtttcccctcctttaccccaaatccgagatagtttatttaactttgatttttaattgccagaatttttttaagttttgtaaagtgatacagctggaaataagcactgtattaatacattctaattttttaaactgtaaaaatcttgtacatggcatttatgtgtgatagagcaacaaaatatcttgctcaaaggcccaacacacagatttacctgtttcttattgaaaagtcaaaagattaattgaaaaattctttggaagtggggaagatttaattttcattggatgtaaatatttattttattattcctgtgagtatacatttggagaaagcttgaagaaggctttcagggtgactaggtttgtctaagaggtgagaagaaagaagtggaggaaagcacatatatacattaaagaggctgaaatctctatggcaatgaacatttggggaaagatcttaatttgaatagtcagtttaggcagatagtaaaaatcacaaaccagttctctgaaatcaattataagctgccttggggtaatgcctcggcttttgttgatgaggttgcttgactgtacacatttatgagaagatatagattaaaattacaggttctctaatggatagttataaatgaccctctaaatgtcagtttaaacgcaatccattctaaatcaaaaacatcattttctccttccaaatctcttttagttgtagaaatacgtgcttagaattgttgaaagaattttaagactgaaatcgaaagtcttatgttgaatccccatttctattcaatcacttataaattatataatctgaacaaagtaatattaaacacaaaatatagattactgttatggttgagttgtgtgtcctctctcaaaaagatatgttgaaatcataatgccccagaacatgtgagtatgaccttagttagaaatagagtccttgcaagcttaatcaaattgaggtgaggtcattacaatgagccctaattcaatatgactggtgtcctcataaaaaaggtaactcaaacaaagagagaagaagacatagagaagtacaagaacaccatgtaatcgcaaaggcagagattgaagttatatacctgcacaccaggaagtaccaaagattcccagaaaaccaccagaagctagaaagaggcaaggaagaattctcctcttggcttcagagggggtatggcccttatagacactttgatcccagactttaagcctgcagaactgcgagacaatacatttctcttgttttaagctatcctgttaacggaactttgttggccctaggaaattaatacaataacctgctatgtgtcacgcatcatgatgtataatacttatgtatttgcatacatatgtggaggacagtaggtttatttcgcaacatttcttaaaaataaaataaaattatcaggcgtaatcttgaaaatatcagtgaaattaacaaacatgttttatatcacacagttaacagtaaatagaaaatacaatctcaatcacttttgtgtccaaaaatttatattttctccactattctaactactttttggagtagtttgaggacttaaaatacctctttttactttagttcctattttggagcgtattataaaaattaaaataactatcaatctataaggcaccttacaaaatatttgaaaaatattaggtcagaaattttaattatctcattttcttcactagttcagtttatttaacaaatatttactgagctcatattaggtgctacgctcagttctaggaaaccattcactgtagggtagcttaacctcaaaaccacgtgtacagcgtttccctttagtctttggtttttctttagttcaattaatcttcacccaactatgtataaatcttcagagaaataaagaacaacaaaatatctcgtttttaatccatattctattatgacttgtgaaaaaggagagaaaaatcacacacttaacgtgttatcctatcctatataaatagtctaggacaattcttcaaatcagcaccctcccttctttctgaactcttgtttacttcagcttcccttgccatctcaggtgtgataattagaggctttctaatcggctctgcaaagaaaagttagctttctcagcataactaagaaaaaaataacttttttctataaggatgattttttgttacaaaatacatggaaaaatgttttaaaaaccagaggagaacataacttttaaggattatttttttaaacaaatgaaaacacctttaataaaaatataacacgaagccctcttacaaggtcatcccaaaaagaataatctctaaggcaaaatattcagcctgtgtggtaatgttaaaattagtatacattattatgaaataaatttggagtggactttgtcattcaaagaaaatagctttcttaaaaattggcacagaaatgtcagaagtgacccaatttgtgaaatctgcaatcatgtcatggaatgaagtgctgttgttgatcttgagaaaattaacagtagggtgatacctagattccaatgtcccaaagcaccaaggtaatttttccttttcaatagaatccagagaatccatattctccatagcataatgtctgtcagagccatatgcatagcctccatagccagaccatagtccaagctatagccatagtccaggccctggttgtagtagcagctcatggtatcaagagtggggattttgtttgacgataaagctgtgtttcggaagtgtaaatgacatcatgtgcccaggaactcttgcatacctcagaaaagggtgtggtaacaaaaataaacttgaataatccttaatccatgacctcaatgacataaaagacaatctcgttaatctttttgacgtctaattgagggccatttgtccaaattccaataaaatgcactgtgtctatgttgacaacaatgattatggtatcttcaaagagcacacaggaggtgactgccatctctaaaattctttagccaggcatcatagcatctcattactcttcaaaataattgatacactctttactgaatgaaggcaatatcataagaaactacagcttatttgccagtaaaactaaagcaagctggtgatacttgttcaaaatcccaaaataggccacttttccagtttactctaagttttttttaacatgtttttaaccaaaattgagctctttaaaagtgtggccatcattatatatctactctcttcttgagaaattgtgttcttggccaggtgtggtggctcacgcctgtaatcccaatactttgggaggcccaggcgggcggatcacgaggtcaggagatcgagaccatcctgactaacacggtgaaacctcgtctctactaaaaatacaaaaagttagctgggcatggtggtgggttcctgtagtcccagctactcgggaggctgaggcaggagaatggcatgaacctgggaggcagagcttgcagtgagccaagatcgcgccactgcactctagcctgggcgacagagtgagactctgtctcaaaaaaaaaagaaattgtattatttttgctcacaatacacttaatttattaacatcttctcaaagaattaaatttagcattaaatttccatatttaattgactcatatcagggatatatgagtttcacaaaattcctctttttgacactgaccctgagttttcaaaattatctgcaaagaaaaataattttttttctaacacaagactctttttctgattccttagaaaaatgtaactggaatggtatgttattttatccttgtgtgttacttgtctgtgacctattggatgttttaagtgaaagcaaatataaatcaatgaaaaggattcagtgtcactaagaataggtagattttctttgcaggttttctacagatggaaccccagctctacgagtcgttttataaaaacatgtatatcatcctttgtcttatcaacaagcctctgagtttttgctggaaaacatgatttccttcattttaaaaatatgcttttcatctatagaataaaaatagaatttggaagtagaattatgaaagttcataatagattataaaaggccaagagattttttaaggttatattagcaaataactgaggcttttgacttatatagctttgcagttaattaagtgtgtctagagagaatctatcaaaagtgaatttttatgaaacagaaatataatagttaaaatatttttgtttgtaaaaatggtttgaaaatcaatttgtcagtgtttttcccattttcagcttgtactttaactttgtcattgaaggtcccaatcagtcctaatcaataacttccttgaatcccaatattctattatgttattgatgttttctttttcttttaacaaatattcattgaacacctgctgtgtgtttggcatcatattaatgcaagggatacctaaagatcctgactgcaaaacccatacaatcgcatacaaaaactaataatcatattacaatctataatcattaactaaaatgggcactaataagtctgttttttatttccccagtctagaaaataaagttgggatgactcgctgttgttccaaactaattttctcaataagaaatttccatgttatttcacaataatttgacacacttaactattgattaaaaaagtacatacattcttcaatatctaaagggttagagaatatgctgtttattttataatattttattcaaggtgatttctctacctttgtacttgaaagaaaataggcagcagtagcataaagcctggttgatgaatgagaaatttacttgccagttttattttcaatcctataaattaactttttaagactacataatttgcaattttgcttgcaactcaattattttagcaagcgtgtatatgttaaattaagtatcagagagtatattttaaatgttttcaccaccctaaaaaataactatgttagatagtagatttgtgagttagcttggtgtaatcattccgcaatgtaaacatataacaaaatataacactgtgccctcataaacatataaagctatttgtcaattaaaaataaaactttaaaaataagtttagaaagaataattagcattaggcagatgcttccaaaatgctgtcaaatgaccatacctataggcaaaaaaggcagttaaacaacaacaaaaaataataacatataaacagaacagtaccattcccatcattattaatcgcttatttgaaataaacataacatgaactctctagaggaacatggtactattttagtttattattttgtatttagatgttatttttacatcaaatctcctccaaatcatcttccaggtttataacgtcttgtgctaactcttacatgacatagagtggaaagtacctgaaagctactacaaaaacattgttcactggcaagatggtaggagtagaaatgtatgtcaagaattactgaaatttaagaaatttaagagaccttaagtactatctagaatagttattttcaaggaaattttgacgagtagtcagcagaccaatagcaaaactaatgaaaactaattatctaagttatcctccagaaaattaaaaattaaattggtaaaaatgttgtcatggggtttttcttttctttttttttcttttcttttcttttcttttttctttttttaaacagagtttcattctgtcacccaagctggagtgtagtgacataatctcggcccactacaacttctgcctcccaggttcaagcgattctcccacctcagcctcccaagtagctgggaccacaggcacgtgccaccacacccagccaatttttgtttttttagtagagacggggtttcaccatgttgaccaggctggtctcgaactcctgaccctgggtgatccacccgcctcggcctcccaaagtgctggggttacaagcatgagccagcgtgcccggcctctctcggtgtttttaattcagacatccctcaggtttacttttgagaaataatatcttttgggaagcaaggcttgaactctacaggtaggaacacagaaagacaagtaatttaacttgtcaaggaggtagagtagattctcatatgttcaatagtttaaaattgattatacataaaggacattatacatttgataagtcagtgttgggtacatgcgagctttgatagcattctttagaccttacgtattattacaaatattatttatattaactcaatgttttatttaaaattcgctttcattgattaacatagaattactgtgctttgagataaacctcagaatacaaacacactaattggaatgaagattgcaataagttattgtttaaaactaagtcataaaaataatagtgtacataatcatattctaaaaacaaaatcacacacaaaaccactgaaaacagataaaaagtaaagacagatgaaagtacacagtgattttgtccatcttattcttttatatcttcaggacttagaatggtgcccaaatttggagacacacaatgaatatatgttgaataaaatatattattgaggcaaaactgttgaaataaaaacaccaattcagaggaaagaagacaaacagcttgattgaagtctcatcaatgcatttgaaatgtactaaaatgaattgataaagccatgtttgctattcaagttaaacgtgtttatttaaaactattttaaaatacatgtcacaacagatgtcagtgactaaataataataggtgaaaccctgattcaatgtaatgattccagattcttccataaaaactgatggctagttccttctggagcatgaagccaaaaaatggtaggtattttctctacattgagaaaagtgttcgccttgctgaagcatacgggcaagatcttggagttagagtatgagaatcagcaagttttttagtagaatccagagaatccatatccttcacggcatgatgggcggcagcagccatatctatagcctccatagccagagccatatctgtagcctccacagccacagccatagcccagaccaccaaagcctccacagccatatcccaggcctctgtagtagctgccatagtatctcatggtgtcagggactagagattcagttcaatgctaatgatgagtttcctgagtgtaggtgtctctaacttctcagaatgattttatactctaagtagtgggtgtcatgaacaacaatgacaggtgatcttatttccacataacagaataattttaagtctaacaattgtttattttttttcttttcttatgtaacaaagggtccaaactattatttaaagacttttagtctttagtttgcattcctaagaacaaaatattttgaagatgaaaaatgattatagccacttcaaaggccaggctggtgttgtaattaaaatggtctaatcgggttgatagcttccagtaacgctgtaattacataacctcatattgcttttctttttaatttgcagtccatcgtcttggttacttcattcccagaacccaaggacttctcttcatggtagtcagggcatagtcacaaagtcattagtgatttccagtagtcaaatttagaggaaaccttggtttttgactcatttgaactttaattgacctttgacattgctaaccttccatccattcattcttttgtaaagctttcttgccttaatttctatgagaaaccttcaattagcttcctctgccaattttttgttaggcttcttcccaattttttattcatccattaacttcaaaagtgtaccttttcctctgcatacacttttcccatgaagttccattaaatattatttttcttttttcaaattttatttttaagaatacatagtagagtatatatatctatggggtatatgaaatacttttatacagacatgacaatgcatactaatcactggttaatggagtaataatcactggtaaatgataaatagggtatccatcccctcaagcatttatcctttgtgttaaagcaattcaattacactctcttattttaaaatgttcgattaaatcaataatttaatttaaatgcaatttaattatacattttaaaataactaagagagtataacttagtatggccacacttttgtgctatcaaatactaggtcttattcatcatttctattcctttgtacccattaaccacccctactcctccatcactcacatccctccccacccctaccctgcacccacctactcccctttccattctctgttaaccatccttctagtctctatctccatgagttcaattgttttcaatttttagctcccacaaataagtgagaacatacaaagtttgtttttctgtgcctgacttatttcacttagcataatgacgaccagttccatccattctgttgcaaatgacaggatctcattattttttatggttgactagtactccattgtgtatacataccacattttctttatccattcatctgttggtggaaaattaggttgcttccaaatctttgctattatgaacagtgctgcaacaaacatgggagtgcacatatctctttgatatactgttttcccttcctttggatgtataccaggcctccatagtagctgctgtagtagctcatggtgtcagggactagagattaggtttgatgctaaagatgagtttagcaccagcagtgggatttctgtgtcatatggtagcttcattctttgttttttgagaaacctccaaactgttctccatagtggttgtactaatttccatccccactaatagcgaatgaggattccaaaacatctatttggttcttttgtccatttctaatcagattattagattttttttttccgtacagatttgtttgagctccttatatattctggttattaatcccttgtcagatgcatagtttacaaatattttcttccattctgtgggttgtctcttcattttgttgattgcttcctttgctgtgcagaagctttttaacgtgatgtaatcctatgtgtccatttttgctttggtggcctgtgcttgtggaatcttactcaaggaatttttgctgagaccaatgccctagagagtttccccaatgttttcttatagcagtttcatagtttacttttatttaagtctttaattcattttgatttgatttttgtatatggggagagataggggactagtttcattcttctgcacatgaatgtacagttttcccagcactatttattgaagagactgtcttttcccatgtgtatgtttttggcacttttgtcaaaaatgagtaggtgtctgaacttgtttttgggttctctcttctgttccgttggtctatgtgtctgtttttattacagtaccgtgctgttactggttactatcgctctgtaatataatttgaaggtaatgtgatccttcgttttgttctttttcctcaagataactttggttgttctgtgtcttctttggctccttaaaaattttagaatttttttttctatttctgttaagagtgtctttggtattttaataagattgcattgaatctttagagcactttgggtagtatgaacattttaacaatattgatccaatccatgaacatggaatattttttccattttttgtgtcctcttaattttttcatcagcattttatagtttcattgtagacgttttttacttatttggttgcactaatttctaagtgtttaaatttacatgtcactattgtaaaagggattactttttaaatttctttttcacattgttcactgttggcatatagaaatgctactgatttgtgtatgttgattttatatcctgcaaatttactgaattgtttatcagttctaataattttgactgaatctttaggtgtttttaaatgtcaaattacatcatctgcaaacaatgacatttgacttcttcttttctaatttggatgtactttatttcattctcttgtctcactgttctgtttagcacttccagtactatgaataaatatggtcaaagtggtcaccctcctcatgttccagatattagagaaaaaactctcagttcctccatcccccctttttttgtttgagatggagtttggctcttgttgcccaggatggagtgcaatggcgcgatctcggctcactgcaacctccaccccccgggttcaagcgattctcctgcctcagcctcccaagtagctgggattacaggcctgcgccatcacacctggctaattttggatttttagtagagacagggtttctccatgttggtcaggctggtctccaactcccgacctcaagtgatccattcgccttggcctctgaaagtgctaggattacaggcatgagccactgtgcccggccctccatttttgtaataaaggaatgttgttatatcaaatgctttttttagcatcaattgaaatgatcatatggtttttgtccttcatgctgttgatacaacacatcacactgattgatttgtgtatactgaactgtccttgcatccctggaatatatcccacttcgtcatgatgaatgatctttttaatgtgttctttgatatcatttgttagtattttgttggggattttttcacctatattcatcagagacactggcctgtacttttctttcttcgatgtgtctttgtctggtgttgataacagggtagtactatccctgtagaatgaatttggaagtacttcctacttctctatctattggaatagtttaagtaggattcatattaattctctttaaatgcttggtagaattcagcagtgaagccatcgagtctcaggcttttctttactggaagactaattactatgactttgatctcattacttgttattggtctgttcaggtttcagagttcttcatggtttaatcttgataggttttatgtgtccaggaatgtgcctatttcctctagattttccaatttattggcatatatttgctcatagcagctattaaagatcctttgaatttctataatatcaattataatgtcttcttttttataactgattttagttacttagatcttctctctttttttcttagtctggctatagcttgtcaattttgtttattctaaaagcaaactttcatttcatcgatcttttgtattgttttcttcatttccattttatttatttttcctctaatctttattatttttttttcttctactaattttgggtttggtttagacttgcttttctagttcttcaaaatgcattgttaggttagttatttgaaagtttgattcttttttgatataggcagttagagctgtaaatttccctgttaatactgctttcactttatcccacaggttttggtaagctgtgttttcgttaccatttattttcataagtttttcaatttcctccttaatttcttcattgaaccactggtcatttagaagcatattgtgtaatttccatgtatttgtatagttttcaaaattcctcttgttattgatttctaattttattccattgcagtcagagaagatgcttgatattatttcacattttttgcatgttttaagatttgttttgttatctaacatatggtctattctttagaatggtccatgtgcttaagagaagaatgtgtattctgcagctgctggatcaaatgttctgtaaatatcaattaggtccatttggtctacagtgcagattaggttcgatgtttctttgttgcttttctgtacagaagatctgtacaatgctgaaatgcttttattgaggtctatctcttgctttatccctaataatatttggtttatatatctgtttgctcctattttgggtgtgtatatatttataattgttatactctcttgctgaattggccctttaccattatataatgaccttgtttcgtcttacaatttttattttaaggtctatttgtctgaactaagtatggctattcctgcttcttttttatttcctttggcatggaacatctttttcaatccttttattttctgtctatgtgtataataataggtgaagtgtgtttcttgtaggtaatggatcactgggtcttatttagtttatgcagtcctccactcaatgtcttgttatcaaagagcttagttcatttacattcaatgtcactattgatgagtaaggtcttacttctgtcattttgttatttgttttctgatcttctcttccttcttaccttccttcccgtcttatttttggagaaggtgattttcccttgtggtatgattaaatttattgctttttattttttgtatatctgttgtatgcttttctatttgaggttaccatgatgcttgtaaatactatcttataacccattattttaagttgatgacaatgtaacattgattgcacacacaagcaaaaagaaaacaaatgaaaaccctacactgtgtccccttcctttttaacttttgttgtttctcttcatgttttaatacactatatcttataatgtgtttgtatttgttatgtactatttttcattattttaattcacttttattttaggttcagcagtacatgtgcaggttgttatataggtaaattgcatgtcatgggggtttaatgtatagattatttcatcactcaggtaataagcatagtacccaatagttttttgatccttaccctcctcccatcacccaccctcaggtaggtcccagtgtctattgtttccttccttgtgtccatatgtactcaataattagcttccacttttagccaagaaagtatggtatttggtttctctgttcctctgttattttgcttaggatgatggcctccagctccatacataatgttgcaaaggacatatccatttctttgttatggctgtgtagcattccacggtgtatatgtaccatattttctttatccagcctactgtggatgggcatttgggttgaatctatgtctttgctgttgtgaatagctccaatgaacatacacatgcatatatctttatgacggaataatttatattcctttggctatatgctcaataataagattgctaggtcaaatggtaattctgttttaaatttttttcactgccaagctgctttccacaacaggtgaactaatttacattccaaccagcagtgtataagtgttcctttttctctgcaacctcaccagcgtctgttattttttgacttttcagtaatagccattctgactagtatgagatggtgtctcattgtgtttttgatttgcatttctctggtaactagtgatgttgagcatttttccatatgcttgttggttgaatgtatgtcttattttgaaaagtgtctattcatgtcctttacccactttttaatggtgttgtgttttgcttgtgaatttaaattatttatagattttgaatattagatctttgtcagatgcatagtttgcaaacaatgtctctggttctgtaggttgtctgttactgttttgatagctttcttttgctgtgtagatgctctgtaatttaattaggtcccgtttgtcaattttttggggggtggggtgggaaattgcttttgacgccttcatcaagaaatatttgcccagtccaatatccagaatggtatttcctaggttatcatccaaagttttatagtttcaggtcttacatttaagtctttaccttgacttgatttttgtatatggtgtaaggaaagggtttatttccagccatctgcatatacttagcaagttatcccagagccatttattgaagagggagtcccttccctcatttttggtttttggtgactgtcaaagatcagatgactgtaggtgtgtggcattatttctaggctctctattctgtttcattggtctatgtgtctggtttctttatgtactccatgctgttttgttactgtagccttataatataatttgaagtctggtaaatgggatgcctccagctttgttcttgctcaggattgctttgtccatttgaactcctttttagttccatatgaattttaaaatagtttgttctaattctgtgaggaatgtcattggtggttttctgataagattaacattgaatctgtaaattgcttgggcagtatggccattttaacaatattgattcttcctgttcatgaacacggaatatttttccatttgtatgtgtcatctctgatttatttgagcagtgttttgtaattctcattgtagagatctgtcacctccctggttaggtgtattcctagatattttattctttttgtggctattatgaatgcaatggcatttctgatttggctctcagcttggaggttgtttttgtatagtaatgctactgaattttgtacattcattttgtatcctgaaactttgtggaaattgtttaaaggatcttggagcttttgggcagagactatggagttttctaggtatagaatcatattgtatccaaaaaggggtagtttgacttcctgtcttcctatttgcatgactttcatttctttctcttgcctgattgctctggccgggacttccacttctatattgaataggagtggtgagagagggcatccttatcttgttctggttttcaaggggactactttcaagttttactcatttagtacaatgttggtactttgtaggtttgtcatagatggctcttattattgtgagctatgttcctttaatccctagtttgttgaggattttaacatgaaaggatattgactttatcaaaagtcattactacatctattgaaataatcatgtggttttttttttagtactgtttgtgtgactatttacatttattaatttttatatgttgaaccaactgcactgcagggataaaacctacttgattgtggcagattaactttttgatgtgctgttggagttggtatgctagtattttgctaaaattttttgcatgtatgttcatcaaggatattgccttgaagttttcttttttcattgtatctctgccagattttggtgtcaagatgatgctagctttatacaatgagttagggaggcatctttattcctcagttttttggaataatttcattacaaatggtatcagctcttccttatacatctggtagaattcagatgtgactctgtttggtccttggctttttctggttggcaggctttgtgttactcatttaatttcagaagttattattggtctgttcagggattcaatttcatcctggttccatcttgggaggttatatgtatccagaaacttattcatttcttctaagttttctctcttgtgtgcatagaggtgtttgtagcagtctctgagcattcttttttaccgtggggtcattggtaatgtcccctttgtcattgctgattgtgtttatgtggatcttctctctttttatatttactagcctagctagtggtctatctagttaatttttttttctaaaaaccaactcctggctttgttgagcttttgtactttttggcacctaaatttccttcagttcagcctgcattttggttacttcttgtcttctgctagcattggggttgaattgctcttgtttccctagttcctctagttgtaatattaagttgttaatttgagatcttttaactttttgatgtgagtgtttagtgctataaacattcctcttaacattgacttagctgtgtcccagatattctagtatattgtatctttcttctgattcatttcaaataatttattgatttaggccttaattttattatttacccaaaagtcattcaggaatatgttcttaaatgttttgtaattatatggctttgagcaattttcttagtattaatttccatttttattgtattgtggtctgagagcatggttgatgttaatctggtttttataaattggctgacaattcttttatgtccaagtgtgtggttgattattgagtatgtatcatgtgcagatcagaagaaaatgtgttctggtctttttggatatagtgttctatagatgtttgttaggtccatttggtcaagtgtcaaattcaggtcctgaatatctttgttaattttccacttcaatgatctgtctaacactgtcagtcaggacaatctctcactattattctctggctaagtctcttccgaagtctctaagaaattcctttataaatctggatgcttccaggttggatgcatattatttatgatagttatatattcttgttaaattgaacccttcaccattatgaaatccttttttgttttctttgaactttattggtttaaagtctgttttgtctcaacttagaatgacaactcatgcttttttctgttttttatttgcttgatagtttttttctgtattcctttactttgagcttatgggtgtcattgaatgtgagatgggtctcttgaagacaacatatcattggatcttgcttctttatcagactttccactcagccttataactgtggcatttggcccacttacattcaaggttagtattgatatctatgaatttgatcctgcatcgtgttgttagctggttattaagcagacttgtttgtgtggttgctttataatgtcacttgtctatgtacttaagtgtgtttttgtattggctggtaatggtttttgctttccatatttagtgctcctttcaggaactcttataaggcagatctggtggtaatgaattctctcaggatttgcttgtttggaaaggattttatttgtcctttaattaagaatgttagttttgctggatatgaaactaccagtaggagggttttgtttttttttctttaagaatggtaaatataggctgggtgcggtggttcatacctgtaatcccagcattttgggaggccgaggcaggtggatcatgaggtcaggagatcgagaccatcctggctaacacagtgaaaccctgtctctactaaaaatacaaaaaattaggtgggcatggtggcgggcatctgtagtcccagctactcgggaggctgaggcaggagaattgcttgaaaccaggaggtggaggttgcagtgagctgagatcatgccactgcactccagccttggcaacaagagtgagactccgaaaaaaaaaatggtaaatattggtaaatatagttcctaattctcttcttgcttataatgtttccctggaaaggtctgctgttagcctgatagagttccctttataggttacttgctccttccctctagttgcctttaaacttttttctttcattttgacaatgaagaatctgatgattatgtgtcttgggtcttattgtgtagtattttgcaagggttctctgcatttcctgaatattagtgtttgcctctctagtgaggttggcaaaatcttcatggacaatttcctgaaatatgttttccaggttgtttgccttatctccctgtctttcaagtttgccaacatgtcacagttgtgatatctttacataattccgtatgttttggagttgttctccattttcctttatcattttttctttacttttgtctgactgatttgactcaaagaaaattttcttactctgaaattccttcctcagcttggtttattcttctgttaatacttgtgactatattctgatattcttgaaataagtttttcagctctatcggctcactttggtccttctgtaaaatggccatttgtcttttgtcccatatatcattttactgtattccttagaatccttggaatgggtttcaactcatttaaagtgtcaatcgtcttcattcctatccatattctaaattttatttctgacatttcagtcatttcagcctgaatcatttcttgggaactggtgcagctgtttggaagtaagaaggcactcttgctttcttgagttgccagagttcttgcactgtttctcatctgtgtgggctgatgtttcttcaatccttgaagttgctgtcctttgaatgtgtgtgtgtgtgtgtgtgtgtgtgtgtgtgtgtgtgtgtgtgtgtgtgtgtgtgttgcttttaccttctttggtattcttgggggttttgtgatggtataaggtgtgttcaatcaactgactttgtttctgttagatttctgtggaatcaaggctcggctcagcactcctggactgtgtgctctaaatatgggaggctggtatttgggcttctggctatgttctctggcctcttgaggttaggaacctgttgcattggaggggccaagctcttcccagacctctggacagaacattccaaagagtggtgccagccaaagcacttcatcaggcagtaacagtgggatccatgctcatgcatgtgccaacagcagcagcagcatagcaacatgcatgttcctctgctagggtgggattctggcaaaaggaagtgatagtgtttgtaacagaatactgacaaatcaaatagtaaaagtttaaataagaaaataaggaactgatgacaattttatttttaaaaaattggattaattatattaccactaaaattactatctaaatcttcctaaatatctaaagaaatttataaaatattgattaaagaaaacacaatgtgtagagaaagaagcatggcaaatataacaatgcacatgatcattacaacataaaataatttctcagagatgacaccaaacaaaatagcaggtcattaaatgtgaacaagcttaacttacctattaaaatacaatgattattaattggactcaccaagaaagaatcactatgttcaagagaaacattgaaaacaaagtgattaagaaagtctaagaataaaagtatatgcaaattaaatacaaaatgagataccataatatttctattaggatggctaaatttttttaaactaagtgtaatgattgattaagaaagtctaagaataaaagtatatgcaaattaaatataaaatgagataccatattatttccattagaatggataaaaattttaaaacgaactgtaccgatagctagcaagtatgcaaagcaacaggaactctcatttattgctagcaaaaatgcaaaatgacccagccactttgaaagacagtttggcagtttcttaaaaagctaaacatattcttaccctataatccagcagttgcactccttaatatttacccaactgatttgaaaactgcctactcaaaaacctgcatgtgaatatttatagcagttttatttatacttacaacacctagaaacaatgttattcaatagttgagtagataataaactgtagtatacccatattatgtattcaataataaaatatttgagctatcaaaatggaaagacatcattaaatcttaaatgcatattactaagtgaaagaagtcatctggaaaggcaacctactgtatgtaattctaattatgtgacattctggaaaaggcaaattattgtagttgatgaagttaacacacataagatacataatatacatatatatgaaagtgtgggttgacaattctgataattctttgaaaagaagcaaagaaaaaccataagaaatacttgagccaaaaaagcccacatgcctcagtggtttcaaagattattctgcaaaaacttcagacataatccttatgtgacatacattgttacagagcattgaaaatgaatgacacctctattactttctatgaaattagaataccatttatctaaactagctaaggatagcacacacataaaaagaaacttacaggtcagtattacttaaaaatatgtatgcgaaaatactaaataagacattagcaaatagaatcaaatgcaatgataaaaaaatacatgaggaaatgggacttattttaaaaagacaagtatcaatattagggtgttaattaatgtaatgcatcatattaacagattaaagaaaaagtcatgttaccatttctataaatgctgaataatttttcacaaatttgaaaactcattctggatagaaactcttaagaatatagaaattgatacataatttcttaacataataaaattgccttaaaaccagcatcttagttaactgtgaacctctagagacatttccacaaaaatcaggagaaagggaagggtatttattatattcactagtattaaactttgttctatagatattagctaatgcagttgggcaagaaatatcagataaatgagaattggaaaagaataaaaagaagtaaaattacctctgtttgcagccaacatgacagcatacctggaaaatctcttgagaatcaatggtaagccaaactcaaaaattagaataattcattaagccacatgacatgaaattaccatagaaaaaagcaaccatttttatctacacaaagaagtcaaagatgtcaggatacataaaccactgtttacaaaagtaacaagtaatatcaaatacttcagaatatactttacaaaaaatatgaaaaatctctattagatgtcttaactcctgaaagacttaaaagtaggcttgaataaattgaagaaaatattctgtcttcatgaaacgtatgatgcaatatcttaagaatgtacgttttccccaagttaatttataaattcaattcaatgtcaataaaatcacttctctttcttattttttaatgatatagataaattgataccaaagttcatgtggaagaatacatacacaagaacagccaagaaaatgttaattttaaaaggctccaaagaaactctagtcctaccagatattaaactataatataggcctctataattaaagtaatgtggtagagatgcatgaacaaaaagacaaggaataaaagaaaattgagatatagagccaaataatatgaaaatataatgtatacaaattaggcacctcaaatcatttgggtaaaaatggacttcttaaaaagtaatgtctgggtaattagccacttttttttttgttttttgttttttgtttttgtttgtttgtttgttttgagatggctccgtggcccaggctggagtgcagtggctccatctcagctcactgcagcctccacctcctgtgttcaaaggattctcatgccttagcctcccagttagctgggactgcagatgtccaccaccacacctggctaatttttgtatttttagtagagataggagttcgccatgttggccaggcttgtcttgaactcctgacctcaggcgatcctctgggattacaggtatgagccgtcactcccggcctacacagccacttttaaaacattaaaaagacaaagtagatcctacctccccatgaccaatatgtaaccatctccaattccatcagagttcaaaatgtaaaaatagaaaccacacagtactaagagagaacacaggtgaattcctgtacaaactgagtttacagtaaaaggctttctgaaactgactaaaaaaccagaggcaataaatacaatacttgataaatttgagtttaaattggaattgtctattgaaatttgtacgtaaatgtatgtgtattgtgtctgtgtacatggtgtccattcctataactatacctatatatattgattggcaaaaacaccataaggaaagcgaaaaataaaaaatgacaagcagacaagaataaatacatgcaacatatgtcacaggtaaatgggatcatattattgatatataataagcattgagtattgaagtaaaaatgggaaaaatatgaacagataattcaaccagaagatataacatgaccattaggcataacaaatgatgttcaacctcacttgtaatatgagaaatacaaattaaaactaatttatgaaccatttctcacctgtcagattgggaaaaaaatagaaatatgacaatgcattttatcggcaaggctattgagaaatagtcattcgtatacattgcggatgggaatgcaaattggtaaagtccagctggagcgggtgatagggagaataatggccccgttgaatgtccagatgtcagacctcatcatttccaagtttgtgagcttacatagccaaagagactttgaggatgtgattatggttatgaaacttcagatggggaaatttttctagttctccaggcaggcctggtcttatcacagacagagtctttcaaagcaggggaactttctctgatgtggagaaccgtaaagatggcagcatgagaaggacttcatataccattgctgctttgaagggtgccgtgggccacaaaatgtgggcagtctcaaagcaggaaaaggcatgggaatagaaagagatgcagccataccaactctgtgctgggcatctgacctacacaactgtgagataataaatatgcgctatttaagctaccaggggtatggtaatatattacagccagagtagaacactaatacataagagaagctggaaatcactactaacacataaacttgcaaatcaacaatgcttctttgggaatttactctgaagttacacctttagcaatacacatatatgaatgtacaagttgagtcattacaccatcacttgtaattgcaaatagtgaagaaatgtaggtgcccatgcataagagaatgggtaaattcactccagtgtatagaaaaaatagagaattatccaactttaaacatttaaaaatgtaaatagagaacatgtctcgaaactaatatgggatgatttccagggcacattgttaagtgataaaagagcaaagtacaataaaatatctatagtatgctaccttttgtgtaagaaacataaagaggaaaacatgcatttatcaaataatttgtatggagaaaaaaggaagggtaaaccacaagccaatctgatttgtcacctgcagaggaagattaaggcaaaaactgaaaggacaggaggatggcaatggggtagaaggaataaattctaagctctattatgatagatttttatttttgcttttcttgaaatatatttatataatcatataatggatactcttttctgtattgcttatttagtttctgtattgcttatttagttcaatattaagtctatgagtttctcccacatcgttgaggacagcagtactttgttacttaccattgctatgtaggaatataccaccaaaatattattcattttgcaatatccattgtggaaatttagcttcttttcagattgaggctattgaataaaactacaatgaatattctaacatttttttttggtgggcatatgcactcatttctgttggatacattcccaggaatggaattggctgtgtcatagaaaatatatatgctaagctttaatagacatggctagtttacttttcttttcttttctttttttttttttttttttgagaccaagtcttgctctgtcgcccaggctggaattcagtggcacaatctcagctctctgcaacctccgcctcccaggttctaagcgattctcctgcctcagcctcctgagtagctgggactgtaggtgtgtgtcgttacacctggctaattttgtatttttagtagaaatggggtttcaccatgttggccaggctggtgtcgaattcctgacctcaggtgatccgcctgccttggcctcccaaagtgctggtatcacaggcgtgagccactgcaccaggggcatggccagttttctaaagggcttatactaattcattttctcagtggtaatgtgcaaaagttcctgatattctatatcccggcctacataaacaaaatgttgtaagtccttttaataatgactttctggtgagtgcatattactatttctcactcaaaatttaatgttcatgtctctgatgacaaatggtactgaactccttcatacatgctaattagacatttggatatcttttacgaattggctaattaagccttttgcaaattctaaaaattgttttgttagattttttcttattaaatttatagcatatctaaataagtaatgtgtgccaggtccacataactgtgtgctaattgtcttttttctgtctgtggtcttttccattttttaattgtgccttttggtaaataggaatttagaagttcttaatattttcttcatcaggactgtattggttattgcaggttcttaatatttctgtataaattttagatcaacttgttaagtttatatggtttggctctaggtccccacacaaatcttatcttgaattgtaatccctgtgtgtcagggtagggaactggtgggaggtgattggctcatggttgcggatttcccccatgctgctttcatgataatgagtgagctcattaaaattgtggcactttcatcctcgctctccctctcctgccgccatgtaagacatgccttgcttcccctttgccttccgccatggttataagtttcctgaggcctccacagccatgtggaactgtaagtcaattaaatctcttttctttttaaattacccagtctcattattttggatctttaagatttaatgactgccctgttgggttttaaacttacatggtgcctgtagcccttttcttttggatgatttctccctttttggaatgggagtatttacccattgcctataccctcattgtttcttggaagtaactaatttgtttttgagtttacaggctcataggtggaagagactagccttgtctcaaatgagattttggactgagaacttttgagttaatgctggaatgagttaagattttgggggatgttgagaagaaatcattgtattttgcaatgtgagaagggcatgagatttgggaggggcagggggcagaatgatattctttggattagtgtccccatccaaatctcatgtcgaattgtaatccccagtgctggaggtggggcctggtgggagatgattagctcatgggggcagtttcttatggtttaacactgtccgccttggtgctgtcatgacagtgagtgagttcccatgagatctggttgtttaaaagtgtatagcacctccactttctctctcttcttcctgctccaccatgatttcttgtttgcccttcaccttccacctgcttccccttcctcttccaccattattgtaagtttcctgaggccttccctggagaccagtagatggcctgcatcattcttcctgtacagccagaggaatcatgagccaattaaacttcttttctttataaattacccagtctcaggtatttctttatagaaatggaagaatgaactaatacagctaaccttaaaaaaaaagtacagaagagtcttagtgttttatcttatcttattctctgaaagagaaactgttcagaattaactggtgaaatcatctagtcttaaatttgcatatttgtcaaaatggattcatgaattccacttctttatgacatatagaaatattcaggttcgtatttcttcttgggtccactttttatacatttaatttaatcagataatatgtatttgaagatggaataaattggcccgagctttgttttatagctttttttctatgcaattttttaaacatacacaaaagaagaaagaataactattacaccagccaccatattcccatctcctagataaagctattgttaatactttgatataattccttcacactgttgttctccaatgttataatctatgtgcaagctaaaaccttttcttattatattgctctgaaattatcaagatattctccaagaaatagtgaattaaaagattaagcagaagtttatcaccacagaagcatctttaaccttttggtgtagaattcctgtttgcctggacaagaaaatatagatattgagaatgttaaagatgaggaggaggaagaagacaaaggagaaggggataaagaaaagaagataaaggagaggaaagggatggaaagggaggaagaaggtttaagggacaggaagaatgacgaggaggaggagggtgaagaaataatcgtgacatataacgtattggtaatttttttatctataagaagaaaatatcaccatggttgattatattaatgcatcacagcacatttattgtgataaaaatttgaggctcaaaacacatttaccacatgagaaaaagttcatggttagatatcagatattgaaagacaatctttcttagagtataatggctctccagccaataaaaaagtgaatatctggagaacatcactaatcaaatgccaatatctagttgatcaagttttcttcacactattgtcaaaaggcaggtgatccaagcagctgttttgttatggaatatggaattccatatggttatggaataaagtttcttggaagaattgggaatctcacagaagactatatttcaagtatttattcaatagaatccagaagaccagtatcccccatagcatgatgggtggcagcagctgtatctgtagcctccatagccacagccatagcccagtctgcggaagctgccacatccacagctatagccatagcccaggccaccgaatcctccacagccgtagcctaggcctccatagtagctgccggagtagctcatgttgtcagaagtggttagctgttgtaggtcagtttggtgactgtgactggacaggaacatttatatatactctgatgcatgtggaaagccacacctttaaatgtcatcccttagaacgtgttacctgaaaactatgccaactatcttgttttgtaacacccatcccactctcttccttgtttatgaagctagttatttagaaattatacaacatgttttattttctgctttatttggatttctagataagtgttttgcctctaataaaatgtagttgcatttatattcactgtacatgtatgagtttctgagtttcaaatgccataaacaaatctctatagcttcaagtattcttcaaattgcatctcatgcaattacatttatcctctgattgcactctttcctttgacagtccatggctgctgagccttttctaagccaaggatgttatctttattctgccaagaattcacaaaaattgaaacattattgttctctgaaatggcaatcaactatgatgtatgtctttatacaatgtgcttttaaagtcagctgggaaccacattttatagtggaatgatgatatttaatttttaaaagagtcacaaattaatgtcaaaggaatttctcaaatattatgcttcatgtagagccagcctgcttagtagataccattaaagtgtgcataaagtccctgccaatcccttatgaatagtttcctctccccaaatttaatcttagtctagattctaaatttcgtactatcataggatcatataattatagaattaaagagacttgagtcatcatttatttcagtgttcttgttactgatgagaaaaatggattcagagagacaagcagagttacgcaacagtgaaacttagtggcagattaggactaaaacctaagtactttgattattggccttagttcagcagatgcatttgaaatcaaagattgcaggttagggtatatcttctcccacaatgcccagctgccttatatttttgtttcatatcatcaatataaataaaagcaaatgacatgaaaccagtaagcatatatgctcagctactcctgctatatatatatatatatgtatatatatatatatacatgtatgtatgtatatatacactttaagtactgaggtaaatgtgcaaaacgcgcaggtttgttacataggtatacatgtgccatggtggtttgctgcacccatcgacccatcgtctatgttaggtatttctcctaatgctgtccctcccctagtcccccaccccctgacaggccctggtgtgtgatgttcccctccctgtgtccatgtgttctcattgattaactcccacttatgagtgagaacatgtggtgtttgcttttctgttcttgtgttagtttgctgagaatggtggttccagcttcatccatgtccctgcaaaggacatgaactcatccttttttatggctgcagagtattccatggtatatatgtgccacattttctttatccaggaacctcaaagaatacaggttatttttgaacttcatttatactgattaaacttatttcctttaccagtttattaaaagtgctacataactaggtacttaacatatttccatcctgagggaactttgcaaactacaagttgaagggaattattaatggtaaagaattgctgtatttgaatttgcttcagttaagaaaatgtaggttcaatataattttaggtaattttttaaaaagactattatctttagcacttgtcacaatccagataaaaccagatatatttgcttggtagggaaaatattattatcaggaatagaagatcccagaacctccaatctaggaattattttctagggtcctctgctttatttgattcctaaaagtgaagctaacacgtatgtgaactttgcctgtccacgaagcatcaagtcatctgcctcttctcattctcagctcacacgacctcccacttggcactgataggactagactgaccccagtcaccctatgactcacgctggtttctgtagagaagaaacgctttaccgtcttttatctttctgagatactagtgcattcacattttaagattttaccaaatatcaatattaggaacttctcttattcttaaaacaattctttatttttttctttaatgagcatgtattttacaaaatatattcacataaaagtcaacattattattctgtggttgtgaaactactgtggaacaatcaaaccatcaaacggaaacttcatgaggtaaggaaaaagacccaattccctcgtcatgtcttttaactcaatagactgtggacatcagacactttaatgaggtcatgatacgtagacttttctttcctcattattgtacccccaataattgcaaaatgagtgaaataaccatctaaaaccatctaaaagctagcacagagtattttcactggcaatccagaaaaaaacacatttttatggatgattcttcctggagagtacacatgtaaatgatacattaattggcaaaaagccaaataagatgatagattttttgtctacacaatttgtacttttattttaaaagtaaacaaagataacagataatacttactgagagattcatatgggccaggcagcccatatgaacacatatgacaccttccatatgtgttatatttagtataacgtatattcaagaggtgtgtagtaaaattgtctatcaaggtgtttgtttagtatactaatatctaaaatatacctctccttatgttaattaattgctccttgtattctcttgaccagtttcctaaatagttgctagtaatattaaaggttcaaaaaaagacactgaaaagtatttatcttgctgggtgcggtggctcacgtctgtaatcccagcactttgggaggccgaggcgggtagatcacctgaggtcaggagttagagaccagactggccaacatcgcgaaaccccgtctctacttaaaaaaagtagaaaaattagccaggcctggtggcacccacctgtaatcccagctacttgggaggctgaggcaggagaatagcttgaacctgggaggcggaggctgcagtgagccaagatcatgccactgcactccagcctgggcgacaagagcgaaaaaaaaaaagtatttatctgatattgcaaagattgtgtgaaatatggattaaacaatgagaagagtcgatgctgttttaagctctagagatgataagatgtgtaaaaattatgaacaatgccacattgttatagaaaaatacctgacaaaatggtccaagagctgcttcatagtttcacattgtttctttattgccatatacaatatccaataacatgtttatttttgtgaataaaatatgtttctatccttatctaatcattgctgatgattcagggtacggtagggaagctctgtttacccaagaaagaatcagagtctttataaaatggaattattaaagccaaacacattaaatttctataaagattttgtaaatatctaatatctaatctgcagataattttcttgacacaattccaattttgataataattgaaaaggataaagacatgtctttttattactaaatagctctgtaaacattttgctataggaaaattaaatcatatttttattcttatattgtgtaagctgatcgcttcagtttaagagtcctgttaaatgtttatattcttactctcacaggtcttaccatcactgtgaaaatcatgcatataatttgctaatgaatactgaaataagggcaaaaatttccacaattgacactgttattaatcatttatctgtagagtatgtcgatacgtctggaagggaaactagatctagagatgaaacaatggatagtaaatatcattataaaactgatggtattgtcacatacttgcagaacataaggaaataaattaattatgcattagggtaacaaaagagtgcaattagatagatagttataagataaacattataagttaaagactttcatgcactactaaaaaaagcccttcgtaaaatataattgaataatagcttattccaatttcaataatgtcaaatagagcaatagatttaacaagaaatgtgcatgacattggtgcagaaattttatggaaggatatagatgacttgaatgaatgaagaattatgacattcattttattgtatgagaagataaaatacagaaatgatacaatccttcctattttaattcagaaatgtaataggatcccagtcaatatcacagcatgatttttggaaatttacaaaagtatcttaatatttatctgataaaaagaagataatttcccacacaaaatattaaaatatagttaagcagcatggtgtaattgttaaaattagcagcttactgaaatataataaaaatccaatttattattctgtttatatccttcatttttcttagaaattttataaatatacagaaggaaattaaatttttatattttgttatattcttttatgtacaagaaaaaatgttaacttttgttaaaatgttgtttccttattgctccatctgttctttgaaagtctagaaaaaattaacttagaaaagtttattgagaatagttttgttgactcagaattgcttgtctaattaagtttattcatttcttagtgaaatatttaagacattttaatatgttggagtaaagtatgacttttcttcagatattttcagtttcttagcatgcaatctgaataatgtcctacaatttcaggggaaaagtctgtggccattgttatatcttcttgctcatatttaatttcatcacacacatatacacattgcatcacaagatttatttctgttttcacaattcctcccatcaactgatcaatttaccaattctgcccttattctatatattaacactttagtgtttgctttaatttttattatttcatctttctatgtactttatagttgcctatttggcctcatcctaacttgcaaggtccacaagcacatatctccagttttgctcttttaattgttactgtaaaatgattaacatatttaaaggcctgcccatgttttgctttatatgttgaaatacaacctagattttcatgtgcagtgttcttattttctttattttataagtattttactgtcttaggcttttttcttctactcattacataattaaaatacatatttcgatataatttttagtaaactaatctctagttttatagcatcgtgggttggcaatgcaatgtttggtaaagtattgaaattcttctggattgcagactatgctgtttttctaaatattgtacaaattgttgaaaagacctgtgattaagaacatttctgtttttctacatcatcatttgtcatttttatttgacctatgtttattatttttatatagtgttttcttaaattgatagaagtgtgataaattatttaatatctactgtattcctcttaaatttgcttatttctaatatttgcttttcgattatgtcaatctattttttgactcacagttaataatagctgttgtaaccttattacttgtagcagtcttctcaatgtataattaaaatttgtacaatgtaatacttttaatttatactttatttcataagacttttgttgcacttgttttcagcctgcattgctttttatatctttcgccaattttttttcttgttttaactatttttgtgtgtttaaagcagatgaccacaattgatatttggtgaccacagtacaaatgggtgaaaaatgtattattggctagagctaatactaattagataaatattacattcggagcaataaagtaatgatgccttaggcaatgtcacaaagttctgaagcttttatgttattcagtgagtcaaatcattgcaaattatgaatacttgtcagaaaaaatatatatctatacagcattttaaatataatcttgagatctgtatgaacaccaaaaattcaaggcacataaaattaaatgatgaaaatatttaacagcctgcccatattttgctttatatgttgaaatccaaacctaaaagctaagttagatggcttcataggccaggaatcttgatgcctagtgtgggacattgaaattactaggattgagaaattgaaggatttttttaactaactagcaaaaactaataaccttatttttccaatttttctttacccatagataaaaggatgataatcattctcatatatagtttaagagtcaactctttgagatacattacttccggaaagaactatgtagattagccatttgaaaatctaagtcattattagaaagaaaattgctcttattgtttgatgagcttaggactgggatcttaactctagtaacagctctaattggaagtcttgactagtttcctgggcatacaggacaaacagttcttttaacagagtcaaaatatttgctgataaggggccatcaaggctttagtgatgtttttggcatgttggagtcacattgagggactcaagtgtttttcagggcaaaggtgaccttaataaagctgcaaatactcctgataaacttgggataattaaataagttgtcttctcctgatgtcattaaatattcagtttacataacttcctgtgttctgattctttgccaggtacacagctttctgattactatgacattcaccactccttacaggaaaagggtaagttaattatattaagtttaagccctttggccactctgacagtgatttctcagggtaaattaataaattggcctctgattatgatttcatttctcatataaaataaagatgacatgctgataaaataggctttgagtatttccatttccccgtgatagtaatttgtctctgtaaattaataaaatgatctgattataatttggatttccatgtaggttaactatagggataattcaaaaatcaagctaacgcaaatgttatagttcctgtaacaatgatttcatgttgtatattaatgaataggcattctgttttatagatgagccactttaacttgttaatggcagtcaggccctgagagatggagttgttctcagtgtactgactgagccatctaaccaaccctacaagctaaagagctagactttggatagggatacatttttaagcgtaactaatgttttcctaggaggctcctcctagagatttgactttttcttctctggagattctggaaacgtctctctgttccccatgagataagaattaattatgcaatggaattatttttgtcaacacatacctggggctaaattctgtatcagtggtattccagaaaatatccttacccagctcatttctttaatgaatctattgaacaatgttctgggctatccaagatacataaccatgaagatacaggtgatctgttattgcagagccttgtacatgcttcactgatgtgtctcattacctgagcttccatgccaaccacagactgcttctgctcttgttattactagtttctcctttaaaatgttgatatgggatgggggcagggaagtgctgggtagagaagggtggggtccctggcaagagctgtggtcctgtgcccgtggacgtaagtaagaacgggcactcttgtttccatgcccaaatgttgcatttttcaagaccactctggcccattatgacccccaccctgtgcccatataaacctgagaccttagcggacacacacacaagcagctgaacgtcaagaggagtggtggagagcagcagagagcagccaggcgatatggcagagaaggaaggaagacgtgcctgaatgtcaagaggagctcgtctaacaacagctgaactgccgggaaagattatctccccaacccctccaccttccagctccccatccatctcactgagagccacctccatcactcgataaaaccttgtactcatccttcaagcctacgtgtgatgcaattatttcaagatatggggcaagaacttaggatacagaaggctgtcacactgctcctctgcccttgtgataaggcagagggtccattgaactgattaacacacaagccgcctgcagatggcaaatcagaaagagctttgtaacccatgcccatttgggcttctggagttgcagacacccagcccttggcactgctatggggccggagcccaaaagttgtcactcagacttctgcacctgtacctctgcatgctcccccttggggtttgagcaagtcacacccctgtcacatgtcctgtgaggggattcagggaactctcccatttcaatatttgtaggttaaatatcatattttactctgcaactagaagtctttgtttaatttatgaagcttatttatatctgtctttgcctctttttaacctcataaacgaaccatcagaactacctcggtttttgctttacatatttgaaaattttcccttgttctctattaattaattagaaacattttatgctgtaaccaggacaattactcccatgttggtatcctggtagtctaattatgcttaagtaaataatgagacggttcacatttaaacggtgtcgtaaaatcaaaatataaactgcatcaaaatcattagcgcagttgttaattttgagttttctttaaaaacaggttggttcaaagttcacagtattggagtattacaaatgtacttatcatattcttaaaagagttatattcagagactttcataaaattctacagttaatgtaactggctgttgaagtacatggctttccagttaatggcaatatcagattcctcaatttctggtactcctctagaaatttaacttcacatttagtgggctgaaatagttgtctgaacttagagagagaaacaaaattttacgggattcttgaatgtgatgctccaacttttttatgtagaacatgtattttatgttctttaaaatgtatcctaagataaattcaaagtaccagacttaaatatctgtactataacatttttctccaaccacaatagaattttacttatttgtccttataccatttgccattgttgaggattctgtgaagaaatggttttctgctatttatgtatttatttatttttatttacttttttgagttggagtctcgctatgtcacccagcccagagtgcaatggcatgatctcagctcactgcaacctctgcctcccgggttccagagattctcctgcttcagcctcccaagtagcttggattacatgcacgcaccaccacattaggcttttttttttttttttttttttttttttttttttttttttagtagagatgggatttcaccatgttagccaggctggtctcaaactcctgatctcaaatgatctgactgccttggcttccgaaagtgctgggattacaggcgtgagctacagcacccggcctgcgatttatttttgtagttacagggagaataatatctgacttcaaagagtttgtattgtcacatcatgttctctttactgtatatatatataaattatatataaattatatagaaatatataaagtatatataaattatatagaaatatataaagtatatataaattatatagaaatatataaagtatatataaattatatagaaatatataaattatatagaaatatataaattatatataaattatatagaaatatataaattatatataaattatatagaaatatataaattatatataaattatatataaattatatagaaatatataaagtatatataaattatatataaattatatataaatatataaagtatatataaattatatagaaatatataaagatatataaattatatagaaatatataaagtatatataaattgtagagaaatatataaagtatatataaattatatagaaatatataaagtatatataaattatatagaaatatataaattatatatattatatactgtatatataatttatacagcatattaggaatactcatggaattatttttcctcagatcataggattaaatgttgaaattctgatgacattttgaaaatatatcaaaagttggtcctctaatacaaaatactataaaatgagcaaaccacagtagctttcgattaagtcattctcaagtttactcattcagcatatatacattgtgcatgtactgaaaagggtcgttttaagctttggggatacactaatgaaaaaaaaaatgtcaagagaaaaaagtccctttcctatggaccatacgttattccaggtgagaacaataatatcagatattaaagtacacgaagaaaacagcaagcagtgggctagaaagtgcagcaagggagttaaaattttacagagtggtcagggaaacctcacagagaatgaaattttgagacaactgtcaggaacacagagaagaaaattttgagacaactgtcaggaaagatgagaaagcaaattctgttgatatttgagagaagagctctccagttggaaggaagagcaagcactaagacactgatgggaagcatatgtctggcatattcagaattagcagggggacaaaggtggtcagaggaatgggcactggtaagaggtgaggtcaaggaagtcccatggtggaggagggtggcaggagggggtggggaagagtctgcataaattgccaggcaagtctagctctccctgtgggtaggcaacaataggtttcagcaactgcctataaatagacatgtgctgactgttgagagatgaaggtaatctaggagccattgtgaacaacaactaggaaagagatccaaggagatatgggcggaactttaaatgcatctactatgtgtagtttgaacaaagactctttgatgtttgtaatggtgtaatggtggaggtggcaagaagtggttggattcttggtgtattttgaaagtacagtcaatgtaactttttgatgagttggaagtaggcttcaagagaaagagtcaagaaaatcaaaagtttggggcctgaatacctaaagatatggaaatgtcataaactgatacggcaaaagggtaaaaacagcaaattttcattagaataaagatgagaagtttaattttagacatattcagcttaagatgactctaagacatgtcggatttgtagcgatagatagatacatgtctcattctcaggtgggagtcctgggctggaaaggagaaacacaattcataggcacagagatatagttttttttcattaagatgaaagagattactgagatatgggggctttgttttatcagttagatttctcagactaataaactccccaaaggaagaaagtaaatgttccgtttgataagattaaggaacagttgttctgattgattcctgccaacaatgaaagtcctggttattggttttcctcgtggacttgcttttattcaggcagttggcgtgcttacctagtatcggcatctggcctggtagaccacggccttttctttctactgtatcccttcgactttaaagtaagaagagcctgataggtgcccaggatttaatgaagtttttagggtctactcacattgaatgtctttaagttacaagaactcattatgttttctgtttacttcctgtcacttcctcctgagaagcctgtcactttttctctttctttttacacttgtacacacacgcacatgcatgtgcgcgcacacacacacacacagtacccatcttcttcatctagcttctactcacttctattcacctacttttacttctatgcttctactcatctacttatctgtcagaaatcactccttccacttcaccgtctcataatcaatgatcacaggatatgttatatgattgtgagaataacaaatctcaacttgtattgcctagtggattaacagtatcctcccacatagactgtgtatccaagagaagagagaccatatccacctcgtacatctgtacatttctggtgtctggatgataactttacactgcaagcaagcattccgtaaatacttgtgtaattaaactaaattgacttggaagtaccaataatatcatcagtcacgcaaaaacaaatataaaaacatggaagcaaaattattgcaataagcaaatgtaaataaagtcaaattcaccttcataagatcatataatattacatttaaaaaaaacatgaattttctcaaaagaataatttaagtggaaatatatggacttattaaaatagtataattgcagaaaaatagataaaaaatttgaaatttctctcgctcaatccagaacctgcagctaatattctaaagtcatttaaaatgtggctatgagctaacttttgataacattgatgggacgaagaacagtggaaagagagctagcacttcacaggaaggtgagtccaatgggctaagtggctctcagggttgattcctcagtagaatccatagtatctgccactgcaagaagagtagcagcaactgtaacagtatcacaatacccacagccatgcccatagcccaggccaccatcacagttaccacagtagcacgtggtatcagaagtggaggattaactccaagacagaaatttgtttccttagtttgaacattatctcagtagtgggtacagcatcttggccttctaatgttttgtttgaataacccattgtttctgaattcttctctgtttctttcctttaaacagttcaacatgttgacattgtgtcaccctgacaccttaatattattattatgttatgactttgtttatattcttttctcacgtaaaaatctatgagctacttcagggcacagattctatcttatccatccctataccccattgcctaccaaagcatctggcacataataggcacttaaatatttgctcaatgggctgagtgtggtggttcacacctgcaatcccagcactttgggaggctgaggcaggtggatgcttgaggccaggagttctagaccagcctggccaacatggcaaaacctaccaaaaatacaaaaactagccagccatggtggtacacacctgtagtcccagctacttaggaggctgaggcacacgaatcgcttgaacccatgaggcagaagttgcagtgagctgagatcacgccacagcactccagcctcggcgccagattcagactctgtctcaaaaaataaaaataaaaataaataaacacatatttgctgaatgaattaatgcatggatgtgtgaatgaatagatgaattcttacaagaaacgtattaatggctcagaatgattttaaacaaaaggaaatcttttatactgggtaactaaatattaactaatctctgtagtaaaatgttgacagttaaatcatgtgccctcaatgagattacctccctcctttaaagttttggtcatttagatttcagtttttgaattcattagtagttttcacggcattacatgtatcctgataaccccgttttaaggagacagtttgtaaataacatccaagattacaaggtgatttacagcttggagtacttatttgattataggtagaaggaaggcatataaagctaagtttggcaaacagttttgtagcattaggaccaaaattgttgtacaaccagaagattctcctctgcgcttatattttaacaagtattgattacttggcatgaattccacctgtgtgactttattttttcagacatttaagcattgatcgaagacctggatggccaacatcatttatgagatcttgatatacacataatttatatttaggattccagtaatgctgaccatgttttgtcactcaaaagcataatcgttattgttgtgaatgtgttactgtcattttttatctggagaatagaatgtttagttaagcccattacctcatgctcttgggccttaataccaggataaaagcaagatacaggtgcttggatagctgtgattaaacagcttagatacttcagtaagtttcaaacatatttacataaaaacaattagaaaaagatagtttaaaagctttcagaaaaaataagataattttctttaaaattatctttaaaataaatttctttaaaaataaaaacatttcatagtattttaatgtgacttgtaattggcacaaaaaggaaatatcttgcaccaagataaatttaattattgttaaatatgtgctcaataattttattctagtctgttatttattaatttcttaaagaaacatacctttagatactaacattttgctcagagcccaggttccttttcaatctaattaatttatttatgtcaacacatttgactaagagcagttctttcttgcaagtaacttctcctccagagatcctaaggctttgctggattttattcatagagctctttcagcctgccatctcctttaacagccctcaatgacaagatagctcattctggcaaaatagaaaaggagtgctttgatttaagaagaaggacatgtgaaacaacagaggcatgtttgcactatatgtttacaaatgtaatacaaaatctatatagtagcttcttgtgcatcccactaaagtgaagttctaccatattggttcattagtgatacagcaagtccaaagtcatctatcccttggcatggaagcgatgatagcaaacttggcatgtgaggtacaatgaatctccctattccactggctttgaatttattaaaaatttgtattaatgtccagaactattggggaactaacacttgttgagtacagttttatttcttatatcattaaaacatcacacaatccaaagagagaaatatatcctcacttttacaaattaaaaaactgaggcaaaaagaagtcgagtaattggctaaaagtcatatgaaaagtaaggagaacagtgatggtccaaactcagacctacccagctatgtgacggtagcatcgctttataaaaattcattttttatctgttccttttaacttaaaaaatgcctactaccatacatatcacttgtcctttccttggaaaaatcaagggttaaaatatttgatgttttctcagcacacctctttagagcagacatgaacacaatgtgccttgaaatttactccactcaccatttagaaagatggaaattggagtgataccagattttttttctaacctatcctataaagacacactaaaaatcaccttctaataagggaataccacactgggcatgagtaaacagggattacaacaagctgaccagctataaaccatgagacatactgcatggtttttcagatcttctgcaaataagctgaagaacgacagtcaaaaggatgtgaagtacaaaacacgaattatggctgcagggaagctcaacatgagatgatgcagcgaacatacagtctgactgaaaaggccaaaagccagggtatgtaaggaaaataaagctactgttttggataatagcattggttgtgctgtgactaaaatgactaaatgagattgaaaatctaccatgattaaaattaattaatataaattattgcagtaccatggaggacctggttcttaacaatgcacactctgtggaagaaagcattcattcatgtattggtatttttagctgacatataatatccatatatattttgtttgtttgtttgtttgtttgtttgagatgggttctcactctgtcacccaggttggagtgcagtggtgcgatcttggctcactgcaacctctgcctcccaggctcaagtgatcctcccacctcagcctcctgagtagctgggaccacatgcatgagccaccgtgcccggccaattttttgtatttttggtagagacagggttttgccatgtttcccagctggtctcagactcctgagcgcaggcaagcaacctgcctcagcctcccaaaatgctgggattacaggcatgagccaccgcacccagcctatatatttataatttgtaattgatgtgttaattcattatttgggagttaacaaactcaggagccagaacactgttaacagggactctgctaagtgctgagaatacaaacatatatcaggcaagaacaaaggcttcaataattcgtaattatgatttatacttcctgctttgtacatttgtgcctttatgtacacagttttctccacctgaaatgaccttccatcttgacttcatctggctacttcatcattgtcatagaaaaccccccttatttgtctctgcaccctgaatgagtcaccttatcctctatctcttgtccatattttatgtttccataacacccctgtggtctttcctctcacagcgcttacctgtaatgtagactcacctgtctactaacttactaaactataagctctttcatggtagggattatgtcttgtttctctttttataatagatgctcagtttacaccatgtgtgtaaatgaatgaatgaataaatcttattgggatagatctaaaataaatggtaaaaaaacaaagtctatgtcttataattaagtaagggaagagttctgtgggcaatgagtgaagagatcatctgggtctgcctgacatgactaagtaggttctgtgggaggcaggcaaagaaacacttctcagataatgcagtgctccagtgaagacttcacagttgactcagctatagctcatcaggcagaatagattttctcatagatgttgtgagttatccacagataagaaggactgagaatgcatgccatggtcagcaaatttttagtagaaaaaacaggataaaatgactgttggtatatgaaggagaagcagaaaatgacaccagactctgatatggtttggctctgtgtccccacccaattctcatctcaagttgtaatccccgcgagtccaggaaggaacttggtgggaagtaggtagatatgggggcggtatcccccacgctgttttcatgagagtgagggagttctcatgagatctaatggtttaaaagtggcagtttcccctgtgctctctctttcctgctgccatgtaagatgtgccttgctttcccttcaccttctgccatgattataagtttcctgaggcctcgtcagccatgcagaactgtgagttatatggtttctgtgttatatagtttctatatagttatatagaacggtgaggatatagtttcttctgagactaagaagccagctcttacctttacagattacccaatcttgggcagttctttatagcagtgtgaaaacagactaatacaaacactaacccagactggatcatgaaggagtcttatgccctgcttataaggtcagattttgtgcattaattgatggagccaaagagcaaggacagacctcccgctgacagcaggaaaacagtctttcaggtagactagtaagaagcaccaaaaatgcaagagaaccaaagtaagaaaagcatataacagaagccaaggaatgaagtggccgttagtgccaaatgacactaggagggcaaacatgagatatcaaaaagactgagtaattagtgggccattggtgacctaaatgagaacaatccttgggttacagtgagaggaagagacaagttagagtgtattgaagactgaatgagaagcatcagagaaaactatatcaaaccttagatttaaagaaggttagagaaagctagccaggagtgatctggtgttgagacaggcttttttaatatcaaaagacttgagcatgtttatagactgactgtaaggtgtcagtggaaaaaaaaagaagctaaaatatagtagacagagaggaaaatttatcaagcaaggcgttgaaggagatggcatttaaagcaaaagtggaagaatgatttttctgaagaggagagaggatatagtttcttctgagactaagataaaaggctaaaagacaggtgcaaatgtagataagtgtgtgggaagagagttgatagagttttcccgtgatagattctcctttctccatgaaaaagaggcaattgttacaagcagaaggaggagcagaaggcagaagtaagctttgaacaaggggctttagagataatagtgaaggggtggagtagctgcactgaaagcaagaaagaaagagtcctgaaaacaagtgaaaggattcccaaatagcaccaaggactcagtcaaaacaagaatcctgtaaatgcatggtggcaacattccatgaggttctgggatttcctccaatagcagcgaggagcctgagtttggaggagagaagccttggattaatgcacagatgaaggtttgcagcataggggaataggaagaggagataatttgctgaaagaggtgtgattgatgagacaaataggatagatcaagggccatatagtttatggtttaaactggacatgagtggtgcactattaaaaataatgtcaggacagtagatataaaccaaaggacacataggaaattaagtgaagaacatgacagattaaaagaggtgtcggataaggaacaatcaatctatattatttcaataaaatggcatggctataatagaggtgtgaagaactgggacaattgagatttactgacttgggtttcatttttagaaaaagagaaccgtctgatattaagtatggctcagggaatgacttgctaaagtagaacagaggtgatgagattgaggaattttgaggccagagtgcttaaattggttgtctacctgataatttgatgaactaaatgtaagaatagaatttggagcccggtgcgatagtctttgaagtatgtaagttagagactgtgatggtggtatagtagatggcagttactggaaaccgtgataaggtgctggatcaaataaagtaaatatataaggtacctaaaagaaaagcctgatagtgcccaatgagcaggaagtcgtctttgttatctgccaggaaacccaagcctgtatgccagctttatccatctgctaagcacagagaaaacaaaggcagccagccaaagaagattgtcctagcccttactgttccttcttccctgctttttgactcagcatagggtacagaaagcagctagtttgtggttaaagaggtaaacattaaaagtagagaacaaaatgatcatgctccattccgctctcctaccacaggttgctaactctgtgtcatctggaccattgttttttacacttgtgctttggttttcttatttataaaatgacagtaatatttggatttacttaatgaggttatggaaaatataaaatgagtttatagacatcaagcacttagatgagagatttgcatgtaatagtaagtgccatgtggcaggtactaccatttatcatcatcatcatcaccatcatttgtcatcacacattgagtgttgggtctgcaagcctttccctctcgctagcctagagtttgcatgtgctactcacatagggagttgtgtttgaatgggttgtgaatacccaaagtcaatctagaaagggctagaagagaaggcagcagcaggagaatagattagatgggaaaaagcagagaacagaccaaggagcatttgaggcccagatgcctggaggatctgctatttaagtgaacagtaagaagtcactgtgtagacagattgctacccacatctcaagtgtatttgatcaaactttcaccagaccagcatctacagctgcacatgaatgtgcaagtgtagtaaattgtatcattattcccaagtattctttcttgtttgctctgtaaaaaaagtatacattcagaactccactgaagctgggtttattatgtgacctgtttgctcaaggaatacaaggagatgtaattgacatcacatctgaacacaccctttcggagatacaactagttttgccagcaatcttgcctttctctgttgccacaaaatgtcctcaagcaaggctgttccttctgcctgggtcccaggaagggaaaacaggaaaagaagacacacagcagttgacccaaacatgtaacatgagtgaaaaacaatgacttgtttttgtagttagctgtgaggctgaaattgtcacctgagcaaagcttactatgcagaaattgttacaaaaggtagaatgttaatatatttaaaaacagatatctgtaattgcttttagattaatgtggtgggcaggggagaaagctctaagtggaaggtggaaaaatgttgacccattttacacagtgcaaaatatttggtagaattttggtttgtaataattttgaaagacggaaatgaacttctggcttcagatgaagagatcatgaagcagaatgcattactgtgcctttttttgttatttttccatttagtcagctttttgcagtgttatcagaggttaatatgctataactaactttctataaataaatcatgaattattaggtattaaattgttaaaaactttatgtaattaacttcatttttatgtcaacaaatgaaattccttggtttttgttttgttttgttattttgttgttgttttgttttgttttgagacagagtctcactctgttgcccaggctggagtgcaggggcatgcgatctcagctcactgcaatgtctgccttctgagctcaagcaattctcttgcctcagcctcccgagtaactgagattacaggcacgcactaccatgcccagttataaaattccttgttttatccactattatttcttgtgatgttatctctggaggaaaaggtgaataaatagaagatatattttacatctataaaaaattttattgaactttaaaatcccaagaaaaaagattgtaagaaaaagaagtaaataagtacaaaccaacattcattttgctcatttcagcttatatatagttaaaaaactgttagtatcaataagaagaatctcattttaatgcgtaatatcatggttcttttattttctggtacgtaatgtgttgtcatttaaattcaaataaaatttaaggctgatgtgtgagtttaataaatacaatttatgattagtaaaatgtggatatttattttaggaaaaaatagaaaatattagattggcacaaaaattattgcattttatgtcattacttttaatagcaaaaacctcaagaactttcgcaccaatctaataaatgaaaaggaagtaaaacttttacatttccattgccctacaataatcaataccaatattttcatgtatattcttcctatatttttccatttctattttaacattttgaaattattctgcatacacatttttaggctgggttttttctttggtattaatattttctaatggcatcaacattttctaaaagatcattttgttgactgtataagattcccaaaatattttatgatttaatgatttttgaatcaatcccatattgtggaatatcattatatttcaaacaacaaggaaattgaccctttggggacagtacctaccgtcatcacattgagccatgttttttgcttcctttaaacagacgaacatctgtgacaattttctagtattaattagcaggctgctccaagatgggcattttcttctcccagaagatagaaaactttgagggagaagacaaagaaacacctgcagattatatatattttttctgttaaagaattttaacgatgctttttagaataccacatgaaataagagagttgaaattggatgtcaacaagggcacaccacatctgttgtaagagaaggtaatgaggagagcctgacaaaggcccctattcagaacatgaactcacttaactttcagagtctcactcagctgcacagtgtgaaaatctttctgctgacaaccctaaccaatgaaggataaatgctgttcctatgctagacacatttgaaaaagccagtcttcatgcagagttattgaagtaaagagagaacaggctcaatattggtaagaaataatgtatcaataaaggacaaaaaaatacttttttgacatttaccctcttgctctaagaattacatcttattaccatttaaggaatcaatcatatgaattatgtctcaataaatgttaaatattacatttgttttatgaaaattgtgtgattttacatagtattattcaacctgctttttgacttaaaatagaatgtaattttcaaaataatgataatagaattctatctcattattttttaaaaagtatatagaagaaaaaccgtaacttacagccacatcagaataactagtcttggacttgccttcccactacattaagctagacaaaatatgtgaaataattattctcaaaaattgtacctcagatagtttaggacaacagtgccctaaaaagggaaacaagctatttgagtcctaaaatcaccaagctttctacccataattctctcaggcctactcccttagttcattttgtgctcctctaacagaatacctgaaattggagcatttacaaagaacagagattcatttttcacagttctggagagcagaaagtccaaggttgagtgtcccagagctggcaaggaagatcttgctgtaccatcccatggcagaaggcagaagggcgagagggcatgtgagagtgaagaagggcaccaaactcatccttttatctggagtccactcccacactaacagcattcattcaccaatgagcccccatgacctaacaaactcttaaaggtcccacctcgcaataatgttgcattgatgattcagtttctaatatatggacttaaggggacacattcaaatcatggcacctacatttcagggagggaaaacccagtgacagcacaatgatcttactgtgttgaggacaaagatgtcaaagtctaaagagtgtctgtacatttaaagtaagaacagaaaaaaggactacacaaagaaagaaatctagttatttacagagtggtcctcacgagcaagctttgttgaacactaagacacaaagtgaatagcgaaactccctgagaaggagaaaagaacagctgagcatgtgcaagccaaataatctccagaactcatggaggactgggagatacatttgagttcttcgaatcggagtggagagactttattgaaaagcagacccccaaaaaagggcacctcactagttaggtcaactggcattgcagtgaaggttacattggatgcaccaagttgtgaaactatcaaagaatacaaaagtaactaccagcaaaaccgacatccacactaaagaaagacaacaaaatctacgttctaaacaacatgtcactaacgttggcatgtattaaatattattaggcaagcaaagaaacagaaaagagttgtgaatgtttggaaacaaaataagtcagtaaaacaaaaccagaaataacagagatgatagaatgagtatattgagaccttaaaagaagtgtcataaatatgctgaaggatgtaaaggaattcatgaaaatgagaagataagtgaaagataaaaaaattttaaatctacatctcaaaaatacatgtcatactgacgtaaaaattcaaaggatgatattaaaatcgtatttaacactgcagaaggaaagatcagtgaatttgaaaattgagcaatagagattaccaaaacttacatacagagagaaaaaatgaacttaacaaaaataacgatcagatcctcagttatctgtggaacaatattgactagtggactatgtatttatacattgtataaacatgtacaggacagagaaacaggacaatttacatatgtacatatatgtttatttatgtatagttgagaatgaggaagagagattgattgtacgaactgtctctcatacagctgtggaggctcggaagtcccatcgcctgccatctgtaagctggacagtcagaaaaatccagtggcaagatttagtccaagtctaaacgtttgagaactggggtgagagggcgcggtgtaagtctatgtctgagtccaaaactctgagaaccaggagcactcatgtccaagcacagaagatagatgtctcagcttaatcggagagtgaatgtgcctttcttttgctattttattctatttagtccctgaacagactgatttatgtccacctgcgttgagacatagatccattgagagggatcttctttactcagtctactgattcaaatgctaatctcttctggaaaaccttcatcaacacacccaaaataacattttaccagtaatctgagtatcccttaacccaatcaacttgacacacaaaatgaaacattgtgtacatttagaagaggggggatcagaaaaagtacttgaaaaataaatggctgaaatatttcccaaaaaacacctataattctgaagagcaaagaagctgcacaggaaccaagtaacaagaacacacacacacaacacacacacacacggagattatcataatcaatatacaggtaaaatgaaaacattttataaaatgtctaatttcttgaataatcaaccttaatcaaaaagaataatcataatttatggggtttatgacatataaaggtaaaatttataacaacgatagcaaagggtgatggcaagtaagcatactgctacaaggttaatatatcaagcatgaaatggcacagtgtgttaattaagatgcataccatagttcttaaagcagacattactgtaataaatttaggcatatctaataaatagtggcaaaaacaaaatgctaaaatatcaattaatccaaataaaaacaggaaaaagaagaaaaaggaaaaaacagatgaaccataaactgagaaaataatctatacttatttgttggctcatctgttctttcccttttcccccttatttaaagcttgtataaccaaataatcagaagaaaaccaattcaatagaaaagggcaaaagatttaaacaagtgtttcacaaaagatgatatgtggatggcaaatgtgcatatgaaatgatgcacaacattttgagtcttcgaattaaagccaaaatgaaataacactaaacactttatgaaatgactgaaatgcaaaagaatgacaataccaagtgatggtgagaatgtggaggaattagaatgctcatgcattgattaaggaatgcaaattgtacatcctctgaacaaaagtttagcaaataaagtcaagcatgcttttaccatatgacccacgcccccaaaaagcatatgtccatcatattcatattaacttcaacctttaaaaaaagtcagaaacaggtaaatggataaataaattatttaattcattcaatgggatgcttctcaatcataataacaaaaggagtacagacacacaccaaaataagaataaatcatagaagtactctgcattatatcatcgttatgtccttttagaaacgaccaaagtaatgtatcgtggtacaaatcatatcagtggctacttggggactggtttagggtaaggatttacttctaagatgtatcagagaaagtttgggattatggaaaattttgatatcttcattgtggtggtggtgacagttatacagttatatatttgtctatgttcagaaaaatctgatcttagagtgcattttattttatataaaccatattccaataaagtttattttcaaatttctggtattttcctaaatgaataagccatacatatacatttatagacatatatacggtgtataatgtgtctatataatgtgttatgtatgtatattatatatatatgtgttcatatataatatttattcttttgttaatgctcctctggaaggtcttcctaaaatgtttctttaaaataggtacaattgccaggcatggtggcttgtgcctgtaatcacagctactcaggagtcagaggcaggaggatctccagagactaaaagttagatgttgtggtgagttatgattgcatcacagcattcagcctgggcaacagcgtgagaacctgtttcaaaataaataaataactaaataataaataaaatagctaaaattattgaaaattggcaccacgtgtttataaaattctatatcctaaaaatacaataaaacactcattttcctctatctgtgcttttatatattatcagttattttaattgttaaccagtcagtagaaaaaattttgtactgtgattcaatatcagtatatttcattactagatagagtaaaaacctttgtatgtaattgttggttgttcacatcttttccttttgtaaattgcatatattatagagattatctttttttaacttttatgctcgggggtacaaatgcaggtttgctgcataggtagatttgtgtcatgaggatttgtagtacagttattttatcacccagatattaagcctagtacccattagttattcttcctggtcctctttcttctcccaccttctaccctccaaaaggtcccagtgtgtgttgttcccttttttaaaatagctgatacataataattaactttttacaatccaggattttattttagtcttgtgtaactgacttttgcaatggaggaaagagttaatatttttataaaataaagtcaatcaataacttagagtgattggattttacattttcagtaggcaggtcactcctagaattttagcaatgttaatatttattttcttatgtttagatatttattacccctgaaaatcatggttgttactggaagaaaaaaatattttttcacacacacacacaaaaatacataaacacaaacactttctcaaaatgctggacagttcttacattatgtaccaaaatgtccatcttttttccccctggaatttctgtattaattaattttctgtcctatgatagtgccgtagttttaaatctctcatctcatttcactgtttcagtttttaattcattcctaatatgtatatagtaaagtgcactaatcctacatatacaacttaatggatttttatatatgtatacactcatataaccattagctagatcaaaatacaaaacatttcctccacccagaagattccactgtgccctttcttatccaatactctcctgcccagaggtaccactattctcacttttattactgattagtttgttctttttttgaacttcccataactaaataaataacaacatatgatgagtatattttgtaccgatatgcatgttgtttcatttttgatacataattttttattgatttttaaatctggtgttccaaactgccataatgaaagcattgatacccatttgcacaataagttaataattatgaaatactatacaaaatatagcaacctccgtcattctagagcactaacttgtattgagaatcagaactgtgtacaggactaaacacaaattttcaatcctgcacaatctcaccaagaatctttcagctttacctttctaaaagttgatttaatttggcatgactgcaatagaaattaaaatgtttaacctttaaatttgttaatccattaaatgggataatttatgcaaataatgagcagagccccaacctatatcttagtaaaaatggaatcacttccctcttattttcatttttcaccagaggaatgatcaccaacttctctgcccagtcactggttgggcaagttgggttggaactgctaatggattgactttttcactccagggaggaaggaatagacagcaatacagtattttcacttccgtttgctttcagaaagcctgcacttgggggctgggagatacttcactagtctcatattgatctataaagtgtgatccctacgttgatcgttggtagttctgctacatttaagagtagcaaatgaattaatatgtactattatctgtttatattttattctgattgctttatcataattaatgactaatcattaataatatttaataagtggatggaataaacatgataaattatcacagggagtttcatagaaagtcagctctcataattaagacctatcaccagaatgcatttgggccagaaatgtggtttgcaagatgttattctatccaagtcaccactttaaaaaatagtaacaggaattctgctagaagatgatcagagttagaaaaactcaaaagagtcacttagatctctaaatgaggtgatctttgctgtggaaacacaggattatcaggcataccaaccagcttcatatagaggattcttatctataagagtgagtgaaaagaggtcagagtactcaatgcagggctggagttgtatcagtacagaagcacatgtttaaatgtagactattaggagagagaaaattgcagtagaaaatagcttggtgggtaatagtgctactggttttgccaattacctaggtcaaacattgaatttttctaaaatgaaacttgcattagatcaatatagagaacagtattcttgaaactgaacttgaaattacttttatacaaacatttttggaaaaacatcagtcatgagttgcctgttttgtcacatcactgactaaaatagccacaggtagcaatttcactctctctttctatttctccctttctctctctctctctctttcacacacacacacacacacacacacacacacaaatacacaaatgataaagagaaatgaatatatatgataagcaatacatattgtgaaagtgattatatttattaaaatgcaaatttataagttttcctgcatggaaattgttaatattataacagacataaacacataaaactaacaaaatatcaaaggattttcccactaactggtaggaaattccactaatccaatgcaaatatgacctgtggtaatcaataattagagttagttaaaattggagagacaataacgaatccataaataaccctgttgatgcaattagtgcatcacaagaaaatggctcaaagtgatcagcaatcagaatttctttctaggagccaataggaatcttccataggagcacggaaagttgcaggcatatccagagttaccatattcagagccatagctgcaaccatagtccaggctaccataatagttgtggtagtagcacatggtgtcagaagatggagttcaattgaggcagatagtagtttctgaaatttgactctcctgatttgtacaaattattttatccaacctgagttatatgtgaaggaaaccacaatctacattggactcattctcacaactaatttgcattaagattaaaaaaaccctcaagaatctcttagccatatgtccaggaaaatattaatattgctatgtgtcaggatgccaacaagtaaaatcatgagccttaaggagatattctcttaattttgtggcttttgcttacttaaaatcccaatttaaacttgatgattagcttctctgtgatcacattaagcttatatttcctgcctcttgaaacatttcttttttctttttcaatatcctcctctacctccataaatgcagtccttaaaccacagagtggccaggaatggttagggaaggttggctatgcagtgaggaagccgatgaaaatgtctttatttacttgcaaatatgcctgtatgttttgactaatttatttcttaatcaatgggactaaaaattttcttccaagttcatatgtagcttatgttcttggagtagtaaagttttttctcttccatcatcctcactttggttatattattagttgtggtgttctctttgcatctgagaaagcaattagaaacaattacccaccgtatctcaaaattcatgttttcctctcctgacacataatattcacatattttaccttctttttatatttaatgaatttgcttattttaaaatatattaattccaaatttccaaaagtattgtaaaaatacttttcatcttctagcagaattcctgttactattttttaaagtggtgacttggatagaataacatcagcaaaccacatttctggcccaaatgcattctggtgatagccttaattatgagagctgactttctatgaagctccctgtgataatttgtcacgtttattccatccacttattaaatattattaatgaattattagtcatttattatgataaagcaattagaataaaatataaacaaataatagtacatattaattcatttgctactcttaaatgtagcagaactaccaatgatcaacctagggatcatactttgtagatcaatgtgagactggcaaagtatcatatcaataagaggcaagtagaacatttagtcagaatttcggaactgcacacagtagttcataaactttagtggatatataccaccaccttaacaatcggaaaaggcatggattctcaaaccagaaaaaaatcaccatgataaattcctccactggtttgcatatgatccaaaaggatcccagagtacatgaatttatccccagttaccccaagcatagaacaaagattgtgattattctacacagaatttgagtatagaaagttgcatcatgtcattcatttggttattttttcactaattcatcaaatctttattaagaatctgctgtatcaggcaccgttataagaaatgcagattgagcagatgaacaaaatagacaaagtctctactttctgcaggttacaatgagacagaagggatagagagactgattttaaaaatgaatgaaatagattctaacagtgaagaatcctgtgagaataataaaactcagtgagttacattaagttcagttactggaggtagactaattaatataaggtggccattaaaagtctctctgggaagtgaacatttcaattgaaatagaaaatgagtcaaatattcctggtattattttaagaaagagaaatcagtaagtgcagaggccagggccttattgtgagaagaaacctgctgcattttaaaagacaaaaagccagcagagtttgagcattatagataaatggaggagagtagcaggatatgaaatcagagagatacgtaagggccagaacttctcagcacaatgaaaggcctttagagatatttttgcaggggcacgctatgttctgattcactgaggcatataaaaggccctctgcggagaagtgtccatactgaagtcacctacactccttcctacccaaggatgacctcaacaaccaacaccatgtgtggcagctactacagaaactacaatggtggccatggctatgggtgctgtggctacggaggcctgggctgtggttatggcggctgtggctatgggtgctgtggctacggaggcctgggctttggctatggaggcctggactgtggctatggaggcctgggctgtggctatggctccttctgtggctgtggctacagaggcctggactgtggctatggctgtggctatggctatgtctcccactccttctgtggctgtggctataggtgcggctctggctatggctccagctttggctactactattgaggacaccatgggagactctcaccctctatcctgtgacattgcaattcaccaattctgaagcccacatgctctgagcctttcccttgattgatgatatcctgcagtggaagtctaatatgatctgttgttgatctaccatctaacccaaaaataccctgagtttccatcatgaagtgggataaggtgaagttcacctgtcacttctccttttatcaggatgatggtgtcacagtgactcctttgatgactttcatgctgtagtttgtttctctgctgacctaataaacacatttaatccacaagagaaatcttggtgtttgtatcttatttattgtccaaaatttttttctttgattttttgcttttatcgttatttttttcaactcttattttaggttcaagggttatatgtgtatatttgttacatgggtgaattgcatgccactgaggtaatatgtgaaaggtagtttttcaacccttaccaccccccaccatccccactccaagagtcccagtgtctattgctttcatgtttatatacatgtgcactcaatttttagctcctacttataagtgaaaacctgtggtatttgattttctgttcctgcattaatgtgcttaggataatcacctccagctgcatccatggtgctgcaaagaatatgatttccactctttgttgtggctacatagtattccatggtgcacatgaaacacattatcttttgtcaactattgttagacatctgggttgattccatgtctttgctcttgtgaatagcacagcgatgaacagacaagtgcatgtttctttttggtagaacaatttttttttctttgggtatatacccagtaatgggattgctgggtcaaatggtagttctgctttaagttctttgagaaatctccagatgctttccagagtgactggaataatttaatattctcatcaccagtgtataagcattctcttttctccacaacctcaccaacacgttttagtttttgacttttttaatagtaactattttgactggtcactaatgttatgcattaacatatatatttgttatatataacaaatatatgacaaatatatatgtaacacatatataatttatatatgtatttgttgtatataacaaatatataaaaatatatttgttggctgattttatagtcttttgagaagtgcctgctcatgccttttgcccatgtttaaaggggttatttggtttttgcttgttgatttgcttaggatccctatggattctggatattagacttttgttggatgcagagtttgtaaataattcctcccattctgtagctatatgtttactctgtagacagtttcttttgctgtgcagaagcactttagtttaattaggtccacttctgtttttgttgcaattgcttttgagaacttagccaaaaattatttgccaaagcctatgtccagaatcatatttcctaggttttcttctaggatttttatagttttaggtctcacatttagatctttaacccatcttgagttaatttttgtatatggaggaatgtaggtcaccaatttaaattttctgcatgtggttagtcagttatcccatcaccatttattgaataggaagtcctttccccattgcttggtcattatcaactttgtcgaagtttagatggttgtaggtgtgtggctttatttctgtgttgtctatcctattacattggtctatgcatcaatttttataccagtatcatgctgttttggttactatatccttccagcatagtttgaagttgggtagtgtgatgcctctagcttggttatttttccttagaaaagaaaggaaaggctcttctttgattccacataaattttagagtagattttccttattctgtgaaaaatgattttagtagttttatagaagtgacattgagtctgtagattgcttttggcagtatggacgtattaatgatactgattcttcccatacaagagcatgcaatgttttttcatttgtttgtatcacttattatttctttcagcaatattttgcgagatctttcaccttcttgattaaatgtgttcccagatattttattttgtaggttgtaaatctgtttgtcctacacgatgggtcataataattggataaaagcagcgttttcaggtatacactgaaagtttcagggtctcacaatgaagcaatcaaggtgttggtcaggtctgcagttttatttgaggttctcctgaggaaggacccacttccgagcgcatgtacttgttggctgaattcagttccttgtggttgaataattgcaggtctcagccctgactgttggctgggggtgtttgcatgctgtctgctggagaacccaagaggcttccttagttccctacaatgtgggttgctaaatatggtcatttgctttctcaaatcaaagaatagagggagagagagattctaacaagatggatgctgcaatcttttgtggcaataacatacaatcatatatatatacatgtatctgcatattcagtcacctttactatatgctatttggttgaaccaagtcacaggccttgctcacactcaaggacaggagatcacatgagggcattgaacatcaatgaatagaaaccatggagccaccttagtagtctgcccaccactgaaataaatgttgtacatccttcatcatagaaattatgatggtagactttcctgataaatatgaatctggggcatttttacaagacatttctttaatgattttctgtattttttctaaggaaattagtccctttgtcaatttctaaatccagagttatcagttttggtaatatgcatccccctagatttttttttacaactaggttttcaaatttatgttcatgaagatctgtgaagtattctcgtataatttttaaagtttcttctgtttcagtatttgtttcttgcttttgtatgtgctttttctcttttttcttaagaacattagcaagtggtttataaatgttaattatttcaaataacagtgtttggaatcatcttaaagtgtatttttgttttcaaatttccatggatttttaatttttactattatcttacttgaaaatctgttaatgcagtagatattatgttacatgttcttatcacaaaacaaagcaataataatagagagtgtgggaggaaacttttggtcgtcatggatatgtttataacatagattgagatgatgccttcacagatgtatatttatctccaaactcaccatatggtatatattaagtacatacagcttattatatgtcaataatacttcaataaagtggtttaaagactcttagtataatacatctaaaaactattgtaatatttaaaaataaattatagtatttgccataagtctacatatagtataaaatggatattaatccattaaataaaaataataatcttgagagtatttcttcttgacatattgacaagattggatgagaaaaaatgccaatagattagaattttatataagaaagataaacacctagggagaagattgaaggaatttgaagtagaacatcaccaacgtgtaaccaggatccgtcacaacaaacatgtacagaaaggcctgttacatggtattggaaatgactaccttcacttgctcacactagatgatcacccttgaaagtgatgggtattgctaaacaggcaaaataaaattagaagtattaacactttttctttacaattgtttgtatgcaaaagatttagcatatctacgcaaaagttctgatggaacaaatctttatcctaagtagtagatcattctttttaagggtaaaaccatatgaaataagtagctatgaaaatcaaaggatcagtctaggcactcacaatgagcctacttttcaaaaatagtactgttgcaaaaggaagaaaacctcttcaacacatttttttcaaattctaaaatgtataatatttgagagccctgaaatgcatagagctacagcaactatataagcaattattaaaatctaaaaagaggcaataggtatttgtcatgataaagttaatttaaagaaaaaaatgctgaagggacaaaagttaataagagatgagatggggaaaagggattgagaaattttcctagaatttggagaaaaggcataaaaagattgtgccaaaaagtaagagatgtgcatgaaagattataaacgtctaatgtgtgagctgaaatttcgtaaatagagtggtcagtataaatttaaaaagcagagaaaagtggaatggaagattttcgttgggtaaagaggtaaaaaacaaaattgttcttcagataattttaatttaagtcaataacattaaataacagtaataactaagcctatcccgggagataactttgcatttagtggttaaacaatccctgcaattatctagagtcaaagaaaataaatactttagatgaatctacaaagagacaacaaacaggtgggtatgaaatatctcttttgccacacctgccaatgagaaagttactccattctctttacttctatctattcagctctaaaatggggataagtttttttctcttttttttttttttttttttttttttttttttagatagagtctcactctgtcacccaggctggagtgcagtggcgcgatctcagctcactgaaacctccccctaccaggttcacgccattctcctgtagctaggactacaggggcccgccaccaagcccggctaatttttttttatatttttagtagagatggggtttcactgtgttagccaggatggtcttgatctcctgaccttgtgatctgcccgcctcggcctcccaaagtgctgggattacaggcatgagccaccatgaccggccaattttttttttctttttcttgaaaaagatgtcacccaggctggagtgcagtggcacaatctcggctcactgcaacctctgcctcccgggtttaagcgattctcccacctcaccctcccaagtagctgggattacaggtgtgcaccaccatggcccctggctggtttttttgtatttttaatagagacggggtttcaccatattggccaggctggtcttgaactcctgacctcaaatgatccacctgtctcagcttcccaaagtggtgggattacaggaaaatggggaaaattttaacacatcatgcattcattctgaggctcatttgagatgatgtacgttaaaaacttggcacagtgattgctctatgctaaacggctaataaatgctacttaattatggttatttagattataaattatttatgtagagttgtgatatgaactacatagaacaagtttgacagtaaatgattttcatacgcaaataatcaacccataaatgatgcacggttttctgctctgttcatgctcggttttctattctattgaagcagtgataacatgggttacgttgagacattgttaggttaacataaattgggaagaaagctaaaaagataaatactggatactaatgaaaagaaaatcaggatggtaattccagattgaaaaagtgtattaggaaaacagaaaataagttcctgcatgaaaatcaaaaagcaagatctataacagcatcatcttgatgagagaccacaggagttcataggatgaattttacattattttaattttcatgcattaaatgcagaaaaggaagttgaaaatactagatccagagggtactgggggtgggagggtcagtcttcagataaatcacatcagaaacttttaatataagataatcttcatccagccccgagctcagagcatacggggttcagaattggtgaatcccgatgtcacaggatagaggatgagtctcccacggtgtcctcaatagtagtagccagagccgcatccatagccacagccacagaagaagcgggagccgtagccatgaccatagccacagcaggagctatagccacagcgcaggcttccatagccatagcctaggccttcgtatccacagcacccatagccatggtcgccgtagtagtttccgtagtagctgccgcacatcgtgatggttgtggaggttgtccttgggtaggaaggagtgtaggtgacttcagtatggatacttcctgtagaagtccttttatatgcctcaggatgggaatgatccagcagaggtagcataccactggctaattttttgactaatataattagtttgttttttctcaattgtaagataatgctgcagaggtattaaggaggcttgttttgtttggccttgcaatttgggctccccttatctgattgagggctctgatgaaaggagacctcacacactcacactcatataatcctgcctcaaactagactttctatagccatcctttacatcaagaaagacttttgttagttacactcttatttgctctaggccccaattaattgtactcttttgcacaacattcagcaaacaataactttgcccttttagtatttctgctctctttatccaaataatacttttttcagggatttagtgtcttttctatactaaagccatgatgttgataataattcaactaattaaaaattctagaaaaccagatctgagaaaaatttgttgtatttttctacttataccagtgagtctaattttcctttatgttcaacctctacggaagaacaagaaaatgtaagttattttcttgatttataaaagaattaataagtgaccaagtcaatgaaatggaacaatagttttatattctcttttaacttcttatcttaaaataatctcaggcatagagatagttgtcaaaatagtatagaaaatttccatatatccatcattcaacatccctaatattaatatctttcataaccataatccacttatcacaccaaagaaattaactgtgtacagtattcttaactaaactgcagactttattttaccatttttctgttattattaacttattttattttaagttctaggaccatggttcattgtagcactattcacatatttattttaatgttctttttttctgttcttggatccaattcacattgcatttggtttttatacttcttagtcacctccaattgctcatggttcattcgtcttttcttggcttttatgaccttacaattttagagagccagatattttgtggaatattccccaattgaatctgtctaaggtttcctcatatgtagattgaggttatacatttgggaagagatgtaactcttgtcttgtgccatctcagggagtcatgatgccaataaatctttgagtaattctggaattgttttaaaattcagatttttaatagaagtccttttcttactatatacccagaatcaacgaagtcaaaaatcaaagtctttgccacggtttagaatcatatataaaatgatagctacatgtgaagtataaaccaaagagaatgatattgctccacaaaaagtgatgaaacaccttatcactcaacattttacaagtgaatgctgccaccatgacttctcttacacgcttatcatccttccttatcactttggagctacactcttattcccaagtctgcatatatgtatttaggctgaaggatattattgggtgaaagtaggatttttaaaaaatggaagccatcacgtccataaccccaggctttgggaggccgaggcgggcggatcttgaggtcaggagatcaagaccatcctggccaacatggcgaaaccccatctctactaaaaatacaaaaattagctgggcgtggtggcacgcaccagctattcataaggctgaggcagagaatccaggagaatcacttgaaaccaggaggtggaggttgcagtgagattgtgccactgcactccagccaggcaacagagctagtctctgtctcacaacaacaacaacaacaacaacaacaagtggaagccatgtgggttactcttggttgctggtaatgtagtttaaatttgacatctgaaataaacgagtcatcaaaataggagatggatctcttattaaaggtacattatttcattatattcaacattcctgagaaacagcaaagttgtcttggatgtattggttacaaggaatattttagatggtttcaatgctaattagtgtggaatgtgaatctaacagtgcctgtgatttgtcccacataccattcatgtggcatttaaggcccttattataagcttaaaactttaaacttaaaactctataaacttaaaactctagaatctgatcctgctatacaactgagcctacctttcttgaaaccatgagctttgataacaactaccatggtggccagggctatgccaaaggaggcctgggctgcagctatggctgtggtcttagcggctatggctatgcctgctactgcccatggtgttatgaaagatcttggttttctggctgcttctgagaaattagagattgctgatctgtttaggccattctcttatgagctatgttttcttcccgtgtttttttctgttcaaagagtgacaactaaaatttagcccacattgccaagtcagaatttatttgatcaattagctggaatttccaacaatttaatcaaacgaaaaaagaacctttgatgttgtgttactagtatatgattaagtacaaataatgttaagcattttcatttgggaaaaagtctaaatttatttttcttcaaaggtaatttattttgcaaacctacagcattttcctacctatatttatttatctagagtacctatattatttgtgattgtgtgtgtgtgttcaggagcacatatgtaaggttgctgacccattggaaacttacagttgatgatgtggatgtgttaggtctgaccaatagtactttgataaaatgtattctcatgggcagagccaagtggtactataatttactttgatctatcaaagcctcatcttcagtgtatccaatgtttgactaaaatcattggcaaaaatagtacctcccttctcatcactttattctgttgcacatacattacatttcttgatacttagttgcatttttggctctagatagctgtaactttttctctaaatcctatattatggctgtttcttttaactctgaaaaaatatactcttgaactcatcctatgcctggtggctgcatagacagcacttccaagtgtcagacccatgtggccacagagagtccatcaaatttaagtatgtttctgtgaaccttttatcaaggtcaatatctgctacctcaggtaatactttcttcttgaagacacaagtctgacccaaaatacaagctgaaaaatatagacttcagtttgccagccgtgctcaagttaagcaaagctgttctttattcactctacttattatttatcagtcgacattgataaaaatataaagcaaaaatatcttctaatctgttagtgactaatgttaacatttggagtttctacaactaataaaatattcatacaaaattactttgttaatggctattatagtatgaagttggctaaactcttaactagcttccaaatacatgattttttaaaacatctagatgaaacaataataaagaattttttaaaattcttcatcaattaaagacagacaacatatagagccgtatcactctgacatctccaagtattgacaggcagtgaaactgaagggagactgaagaaagcatctttgtcacagccttggcttttgtcctgccatagtgggcaggaatcttaggagtcagattcccagaatgtcctattttagcatggtcaaaaaagccagagtaagaactctgtaaaacctgactttggactcaataacccatcatactcagaaaactgctcatcaaatatcaggccctcatcagacttagtatatactttagaaaaattaaaatatttggtaattatcctaaggccacacagcaaataaagacacatttattcaagaaaatctactaaatatagggttagtgagagacttcattcacttgttcacaatcagctcttttcgtacttcctcctccagctcaccatgacagacccaccgctctgggtagtgagaccaatttatagtgcttcttctatccccatctgaagggctacagtatctctcctctgtgtgcaggtgattagcatatctcatgtccagttctgtgtggcagtggctaaagtccaagtgaatctgaccaagaggtatgtgtctccattcctctacctttttcccacttgtagtgccagggatctaccaaaggcatgacaggccagttatcttaagcttctatcactctctcaaccaccctgatcattcataagagagatttttcgtgacagatattgcaagcttaaaaaactagaagctactgcccaaacccagagagtgctagtaatgatgttatgtctctatgagaaaataagcaagtagttgttcctattcccagttctggagtagttgcttcaatattttgcacagacaaaaggcaagccataagaacataaagatctgaatcttttctcaagtgaactagttgatttagaagagtgtgtagaagatttaacttaagtttagactttgaaacaatggcgattttggtgataagtaattaagagaaaactggtttcaccatgtgatatggtttggctgtgttcccacccaaatattaccttgaattgtagctctcataatttccatgtgttttgggagggacccatagggagataattgaatcatgcgggtgttttcccctatactgttctcgtggtagtgaataagtctcacaggatctgatgattttataagaggttttccttttcacttagctttcattctctcttgcctgctgccatgtaagacgtgccttttgcctcctgccatgattgtgaggtctccccagccatgtgaaactgtgagttcattaaacctctttttctttataaattacccagtctcgggtatgtctttatcagcagtgtgagaacggactaatataccctgaaagcaaccaactaaaccataggccagcaagtgtatcagagagaaccagaaaagatagccaggagaagcccttctgggttcagagcagatttcagactggcctcaaaaactttgacaaagaattcaaatttattcattttttccagctttattgaggtgtcattgacaaataaaaatgtatgtatttaatatatacaatgtgattttatacacacacacatatatattaaaataattaccacaaacaacctaattaatatatccataaccttacatgattaccttttccacccctgtggtgagtacccctaatatatactctgttagtaaactgataagacacagagtagtatggtagttgccaggaatggaagttgggggaatggaaaatgttattcaaagagtatgaaccttcagttataagatgaataagttcaaaatatctaatatacagcatagctactataaacaataactgtattttatactaaaattgtgttatgagtctaaatttaattgaatcagattgtgaagcaatttacatccaagagcattgtcaaaaataatgacacaatcccctaaaaattattgtgcctaacagctgagtgtaataccaacaaagtccaactgcttatcagagagtggaaggaaagagaaaatctaagagggttcagacaaaacctcagaaatacagtacacatgctgtagctgtgccttttaaggaataacatcaaaagtttcatgctgaactcaataacatagcccagcctagtctctaagcaaataaggaaacaataagctctggagcaggggggagagaatatctacagtttatagaatataaaatctaaaatgtgcagttgagagagaaagagagagaagatgcaagaaacaggaagatgtgacccatatgccagtgaaaaatcaagcaacagaaactgtctctgagagcatccggatgttagacataccagacaaatattttagccatttatatatgttcaaagtacaaaaggaaaccatgcttcaagaaacaaatgagaggcagaggcagagcaagatggcaagatagaaagctccaccagttgcctcccctcccccaacaaggacagcaagttaacaactatctacaccaaaaaaaaaacaccttcataagaaccaaaaataaggtaaacactcatagtacctggttttacttcatactgctgaaggaggtactgaacagatagaagacacagtcctggattgctgatgccaacctccccacatccccaacaagggcagcctggtgcagagagcatctctgggtgctggaggacagagaacacagcaattgtgaggcattaaactcagtgttgttctgttagagcagaaaggaaagccagggcaaactcagctgacactcacggacacaagggagcatttacaccaggcctgaccagacaggaatcaccgatccctgtggtccaaacttgagtgcctgcaaacctctccatcaagggccaaagtgttctctctctctaagtaaacttgaaaggcaatcaaggccataaggactgcaacttctaggaaagtcctagggctgaaccaggccaagagccagtggactggaggggaggggagaatgcaacatactgagacaccgcttggacagtgaagggaatgttggcttcatctcttccataaccttaggggctacacagctcacagctccaaaagagtcctcttccttctctttgaggggaggactttgtcttgtatcttggattccagctcaaccacagcagaatagggcagcagagttgtgaggccccctttccagggcctagcttgcagacaacatttctagacacaccctgggtcagaagggaaactactgccttgaaggaaaggacccagcatttatcacctgttaactaaagagccctagagtcctggataactagcagtgatacccaggtactacactgagggccttggtgagcctctgagatttgctggcttcaggtgagactcagtacattcccagctgtggtggttacagggcaaaactccttcagcttcagaaaagcagaagataaagtaaaggggactttatctcacaccttaggtaccaacactgccacaaggggatagagcaccaagcaggctcttgcgggtccctgaatctaagacttgacacttggatggcattgctgggcctgccccgggccagagaggaatccattgccctaaagggtgagtcctaggcaaggcagcattcaccacagctgacttaaggaaacttgggcctgaggggaatacaggaggtactctgtcaatactcctcatggccaggggtggcagtggctacaagatgaggctcctcatctttggaaaggaagggaagagtgggaaggactgtgtcttgtggtttgagtgccagctcagccacaatacaatagaataccaggaaaacttccaaagttgttgactctagtccctgacactcagatggcatttctagacccacctgaggcctggggaacttcactgtcctgaagggaaggacacaggcctggctggctttgccacctgctgattgaagagcacccgggcctgagcaaacataggcagtagccagggagtggttacagcaggccttgagtgagaatcttagcaccgtgctagcttcaggtttgacccagtgcagtcatagtggtgttggccatagtggtgcctgtgtcactccacccccagcttttagtgactcagaacagaaacaaaaactctgtatatttgggagaaaaaaatagaagaaaacaagagtttctgcctggtagtccagagaattctcccagatcttgtctgggagacatcaagaaagtacttctatgagtctgcaagaaccacagcattactgggcttgaggtgcccccaaaagtagaaacagcttagatcacagcacccaggtcctttcaaatatctggaaagccttctcaagaaggacagctacaaataagcccaggcagtgaggactacaataaatacctaactctctaatgcccagacactgaagaatacctactagcgacaacaccatccaggaaaacatgacaccaccaaatgaactaaataagccactggcaaccaagcctggagaaacagagatatgtgacctttcagagagagaattcaaaatagatgggttgaggaaactcaaagaaattgaagataacacaaagaattaattcagaattctatcagataaacttaacagagattaaaataattaaaaagtgtcaagcataaattctggagctgaaaaatgcaattggcatactgaagaatgatgccttgtttagaaaacctcatcgttttagcccaaaagcttcttaagctgataagcaactttggcaaagtctcaggatacaaaatcaacgtgcaaaattcattagcatttctatatatcaacaacagacaagcagacagtcatatcatgaatgaactcccattcacaattgctacaaagagaataaaatatctaggaatgcagctaacaagggaagtgaaggacttcttcaaggagaactacaaaccactgctcaaagaaatcagagaggatgcaaactaatgaaaaaacattcgatgctcatggataagaagaatcaataatgtgaaaatggccatactgcccaaagtaatttatagattcaatgctatttccgtgaaactactgttgacattcttcacacaattagaaaaaaatattttaaaatgtatatgaaacaataaaagagctcaaataaccaagataatcctaaacaaaaagaacaaagatggaggcatcatgctacccaacttcaaactgtactacaaaactatagtaatcaaaacagcatagtacttgtacaagaacagacacaaagatcaatgggacagaacgcagaactcagaaataagaccacacacctaaaaccaactgactttcagcaaacctggcaaaagcaagcaatgggaaaatgattccctatttaaaaaacagtgctgggagaactagaaccatatgcagaaaattgaaactggaccccttccttgcaccttatgcaaaaattaactcaagatggattaaggacttaaaagtaaaactcaaaactcatgtggctttgggttgtttgtttgtttgtttgttttttgagacaggtttcattctgtcacccaggctggaattcagtggcatgatctcttctcactgcaacctctgcctcccaggttcaagaaattctcctgccccaacctcctgagtagctgaggctacagacttgcaccaccacacttggctaatttttgtaattttactagagacagggtctcactatcttatacaggctggtctcaaactcgaggcctcaagtgattctcccacctccacttcccaaagtgctgggattacaggtgttagccaccacacctggcctttcttgctgctttcaagatcttttcctttgtctttactggtcatggtttagctatgatatttggggtgttaattttgttttgttttgttttcttctttcacttgaattacttattgacatgtcctaaatagggacagtgaatattaatctagaattaccaattataatataaacactattaaaatattagatttcaatgataaacaaacactgaaagctctcaggaaaaccattacataatttacaataggaaaataattaggctattcatcggaattttcaaaagtgacattcaaagaaagacaaaaagaaaagcattttaaagaacctaataaaagaaagcgttatccaagttctttatatttaacaaagctgccctccatatatcaatggagtagaacaacagcttcctacatacaaaaagtagacatttttgcatccacaagcccatatagagtaacaccctagagggtgagcatcatctaatcaagggatgaatgggaagtgttaagcaaagtattgaatatatatgtgtgtatgtgtgcatctgtgagtgtgtggggatacaaacatatgtgttttggtatgaatgtatgtgtgtatgtatgtgtgtgatgatatgaatttggtgtgctaccaaatatagggattagatgggaggattaataatacataaataatatattttgtgatggaaaagtagttataatccaactaaatgacaaagggataatagaagaagaatggaagaggaaaagagaacaagctaattgttgttttatagacgagaggaagttaaataatattaatataagctattgtgtcagataataaaatgttaaatttaaaaagagggaacagagaacattaaaattagtatatatacaaaggtaaccagatagccactaatataactaccaaccatcaaaataccatttaaaaattttttttatttttgtgggtattcattaaagcataaagaataggaccaaacataccagtcatggcaatacatgtgaatttaattaattaaaataaacattttaaatttggctgttgaactaagcctaactatatgttttatataaacacctgaaacaaaatgatttcaaaatgcaaaattaaagccatgcacaaaggtgtctgggaaaaaaatcccaatagaaaacataacaactccactgtcagatagatagaaatgagggaaaaggcattaaaagtgataaagaagaaaacttaccaagcaagagacacgcaaatcacaagatatctattatatatatatatgtatatttatgcaccaaataatgctaagaccccctttatgaagacacagataccagatacatgccactgagagacataagtagaaacacactaataagcagcactcttggaacaagacagatcaagtggaaaaaataaacaagcagagataagatctaaacaatatattcaaaaggtagctctcatttatatagactgacctttatgccttgataataatgacctttatgccctgataataaataatataccttttttctccagttctcatggaacatccacacaaaggtcatacataatgtccggcagaaaagattcgttttataaaacagaaataatgggaaaggtactctctgatgtcacacaacaatattaataactactaacaagaacaaagaacagaaaaatcctttaacctggaaagtaacaagccttgtatttaaaaaaatgttctttgttgaaagaagacatacaaatataattaccagttttcaataattaatgatagtttaaataatctgtaacagggcctatgagaaatatttttaaagtggttaggaacaattcatagcactgacatgttatcagtaaaaatagaagaaaataaattaatattatgaaatattaattatatttcattaattatgtaatatgaattatgttttagctcaaatatttcccaagggacaattaagtaaatgaaaaatacacacagattaaaataataaatagagaaggagatattaatgaggtacaaaaagaaaaaatacatgtaatcacatgaaatgctattatttgaaagattaacaaaacttgtaaactacctgctaacttgatcaaagaaaaaaatcgagaaaccatatgcgcaattaatagtaagagggaaataaacattgaaacagaagacatttgaaataccatataagactgggtttcagagctctatgtacgtaaattgataatgtcctggagaagtgcagatgaccaaaatggacacctttcaacttagaaatcataaacagattcatttccttaaagttaatgaaaagaattaacagaccctcctcaaaaaagacatatatgcggcctacaatcatatgaaaaaaagttcaacattactgttcattagagaaatgcaaatcaaaaccacaatgagataccatctcacaccagtcagaatggctattattaagaagtcaaaaaataaaagatgctggcgaggttgtggagaaaaaagaatgcttttatacacttggtgggaatgtaaattagttcagtcattgtggaagactttgatgattcctagaagacctaaatacagaactactatttgacccaacaatcccattactgggtatatactcaaatgactataaatcattctattataaagacacatgcatggatatgttcattacagcactatgcacaatagcaaagacttggaatcaacatgaatgtccatcaatgatagactagataaagaaaatgtggtacacatataccatggaatactatgcagccataaaaatgaaggagatcatgccctttgcagggacacgaatagaggtggaggccattatcctcagcaaactaactcaggaacagaaaaccaaacacggcatgttctcacttataagtgagagctaaacgatgagaacacatggacacatagagggcacacaatggggactagcggagggtggaaggtggaaggagagagagaagcaggaaaaacaactaatgggtactagcttattacctgggtgatgaaataatctgtacaacaaacccctatgacactgtgacacaaattacctaagtagcaaacctgcatgtgtaccccgaacctaaaataaaagtgtttttgtttgtttgtttgtttctgtttttttgtttgtttgtttgttttggttttttttttttgagactgagtctcactctctccccaggctggagtgcagtgacgcaatctcggctcactgcaagctccaacttccatgttcaagcgattctcctgcctcagcctcccgagtagctgggattacaggcacgcaccaccacatccagctaatttttgtattttttgtagagacagggtttcaccatcttggccaggattatctcaatctcctgacctcatgatctgagcgcctaggcctcccaaagtgctgggattacaggcatgagccacagcacccggccaaagttttttaaaaaaggactttaagggacagtttttaaataaagaagaaaaataaaaattaacaacagaaaagcccaaacccagatgatttctcaggagacttctaccaaatatttaaagacaaagcaatcccaatattgtacaaattgtcaaagagcacttaaaatgaaggacaacttcctaattcctattatgaagggtgtatagtcatccccacttatcccaaaggataagttccaagatgcccagtgaatacttgaaaccaagatagtaacaaagcctatatgtagtatgttttttctgtatacatacatacctgtgataaagtttaatttacaaaatagtcacagtaagagattaacaacaatatctaataatagaaggaacgtataacaattactgtaaaaacaagttatgtaaatacagtctttctctctccccacccatctctctctctctctctgaaaatagtttaatattttctcacagtggctgatcttgggtaactgaaactacagaaactgaaattatggttaagggaaaactactgtatgcactgaatttgcagtgagaagaatcaacatgcccagtgattgctgcctccacatgtccgtactcttgtgtaagcccctctctgtgagtgagggtgagacctgttgcttttagccaatagaatatggtgtatgtttatgattatgtgtgcttatgtgattatgttacataagactgtagtacccatcttgctggagtctcttgccctcccttgctggttttgaaaaacaagcaattatgtttcaaaacccctttgacaaggaactgtgagcatccttttggaggtgagggttgcctccaaaagatagctagcaaggcactgcaacaaatggccaacaagaaaatgaaaatgagccctttagtcctacaactgcaaggaactgaattctgctaacaaaggcatgaccttggaaatggatccttccccagataagccctgggtacaatcagccccatttaagatcttgaattgcagccttgtgagactttgaagcttctcggtttatacctgaaatagtgtttttatttaattattatggcccactatgcaggtcaaatagctttataacctattactagcttagagtatactagattataaaactattcctttggttatgtctcattaaaaaatagtttctttaaaatggaagattcaaaatgaaggatatagtaacaagcattcatttattttaggagatatgcacaagaaggcttcggaaaattaaattttttctttgttatgtgacagacagcaggcaatgcataacccaacatataaatgataggtacttaatttagtattgagaattactcagcacaacataaattcttcccctagaagcaaaggaggaaactgaaatttattaaaaagcttacttttctaaaacaattgagctttgaattggcaaagaaacctctctagaaattgtaagaaaaatatctcccaaagaatttaattgttagctttcatgcaaactgaaacaaaaactattggtaagaaattttaaatattaaatgattgacataaacaccaggtttctcttctggattaaatgtgtttattaggtgaacagagaaaaaagctccatcataaaagtcatcaaggcagatgatgtgacaccatcattctgatgaaaggagaactgacaggtgaattttaccttatcccgtttcatgatggaaattcaagatatttgtaggttagatggtagctcaacaacagaccatattagacttccattgcaggatatcatcactcaagggaaaatctcagaacatgtgggcttcagaattagtgaatctcagtatcacaggatagagggtgagagtctcccatggcatcctcaataatagtagccagagccagagccgcatccatagccatagccacagagggagcgggagccatagccatagccacagcccagtctgcggaagccacagccacagcaggagccatagccacagcccaggcctccatagccatagcccaggcctccatagccacagaacccatagccaggggtgccatagtagtttccgtagtagctgccacacatggtgttggttgtggaggttgtccttgggtaggaggaagtgtaggtgacttcagtatgaacacttcccctgcagagggccttttatatgcctcagtgtgggtgggaaccatacacaagtcatgccattggctaatttgaaggaccagcatgagtaatttgttgactcttggttttcaatcgtggccttgtggcatttagaacattttctattgttcagccacatctgaaacatttgtgcatctttaatgagcatcaactgtctgatctttaaaactctactcacaccagacattcaaattaccattttccaaccagcctttatggcaagaaatagcattttagtaaacaaactgacctgttctaaacaaccaataattttaccttatttttgctgacattcaacaggtcatggtaatctcccttgagcttgagtttctccatctctttcctgctgctccaaacccattgttttcctttaggaattcttctcattttcacatgagagatggttttcttttaaaagccagaaagtgtcactcagcttccagagactgttgacacaaagccaatagtttgaaattctaaaataccaggcatgagaaaactatacttttctttctcacatcaatatttccttttgtgactgttttaaaacaatagttctttcccatagtttcaaattcgtaatcaatgaggtttcattttatttataaaattgtatttttataaaaattttcctgaaatttcaaggcatttgttatatttgtgttctggctcaaaagtaagtataggtattttcatatttaaaacaataatactggcagaagtatcttttcatgcaacctactatatttccaccatcaaacaagaagtctttggcaaaatatgagactatgaggaacatgttactatagcctaatcttttttcaaagcagtgaagatcagagctaaattgaatgattaagtcaagtagccctctggacttatattcttagtaagatgactttataagagtgagttgaatatagtaaataagagtaaaatatctgtaatgtgctttctaggctcaaattttacctctactatccatagctgtctgaccactgttaactacatgcttcagctgccctatctgcaaatgggattgtaataatgatacctaccccacaaggaaatttagaaaatcaaatcttttgatacataccagacactttgaatagtgtttggttcatagtaggaaccagaatactagaataaattttgctgtctttacttatttcatcccatccctgtttttctggatagaagcttcagtagagagttgatcaattgaataagagaactcaggcatgcttaagttctcatttaggggcattatgtccttgaagctgaagggaagagaaactctgcattgaggatgtacatctaacaacagagaaagtcacatcctggttttactgagaaggggaaagtcctaccaagttccccaacacacatagcacaagcagggggagatacaatgattggttctcacccaggtggatctgagtggagactcattgatttccttactacaaccaaagactgttctggctgtagagacccaaggatgtaacacttcatgctaggtaatggattgaacagagttttatttttgtggcagtggaaaatggcaatatgtgttatgccatccaaaggtgtcagtgcagaacaggtatggtcctcctcaaaaccaacagcatatcactgcacatcgaagcacacctcaggcagagaatgaggagtggtaatgtctttattgcaattgtattttaatactgacaaccagaaagtgattgaattttgttgagtttacctgaaagggacaagaataaatgttttgccatttagtggaaataatgaatcaagatagaatttggtataacagtaaaataaagtgcatttgtacgtttgtaaagttgtatcctgtaaaaatgttacctgacttatgtatttaaagtgaaataaactgttctatctctgaagaaatattgggcaatattacagatctcatactcgaaagacttgccccttaggcacatctgtctccccaaagccatgcagacagacttcttcaactgcaactggtagatgaatgtaaaggaattaacaagccaaaaccaatttgaatcagatgagatttgcatagtttctgttatttcatagaatctcatcatgaaattttagtatgtgctctcaggaaaaaaggatgttaaaaccaggttaaaaaaaatctgtcattcaaatcacattctttgattgtgaaaatcttgacacaacactagaggaatcctagctatgaaggcttcactatgcctaatgaaataagagatttatgagagtgttgccttggcggtgttagcggtcaacccaaaataattcataataagagcaacattgcctgtgatttgccacacctactactgaggaagtataaaagacctgtgaagatggagatgttcaaattcaagaacatcctcttctacacctgaaccatccatttctgacaccatgatttactacagcaactattatggtggctatgggtatggtgggcttggctgtggctatggctgtggttatcgtggctatggatgtggttatggtggctatggaggctatggaaatggctactactgcccatcttgctatggaagatattggtcatatggtttctactgaacaattctagagctcaccagatttgtctgcttgtgaaacctggattctcatgctgctcttgttcatctgatcctgtgtcttcaaaacagcagaaacctaaactaggctattatcaaagaactacagatgctgtctttctctggttctgttgtgcaagatgataaagaataggttttaaaatgcaattctttgattcttaagtcctttaaataaatttagtctgtttgcaaatatagtgtgttttcatgtttattattttcattgtcaactttgcatgtggatgatggtaagatggaaacctgtggataattactatcccaaggggttgacactacatcttatttcattttcctattttttgtccttctgtatatttctcacactatttaaaactgagcttctgtagggacacagttgattgctttctcttcaaataatttctacttgagcttgacaagctacacacctaaggctggtggctgcatgctgctgactgtccttgtttctccagagcacatagaaacacatacacattttaagttgtggcttccatgagttttccaagttgtctgccttctggtagcttcatcactatgaagcctctcagttgcctgatgttgttgatatagatcctgtatacaggaagtgctgtgccatgtctgggaacctggatgtctttataggaaatctctttatgataggcgattttgataatgaagttcatttcatatttcattgcattcatgcaacagctcctaaagtattctaggcatgctgctatattgggagagagcatcttttcatgaatattcaagattatttctgttgtaatattactaaattttatctagttgtatactttataaaactggtatttgtgtactattagaatattctaattgggttttacattttttccaaacggaagagttttagtgaatttttaccacatggtatgaaaatcaaacttctcaattaatctgtaaaaataaactattgacattaaggaaactatattagggaaatttaaaaaacaagttatacaactagataatgggattaaaagtttgtatcatgatttaatgaatacagcaaacaatatatcttttccagtaattagaataaaatgaatctagaaacagaactccaaatctatgcattgccagttcttaaaattttctaaaatatcaaaacatacctaaaataatatatttactattatacatattgtatatgtgttattgctaatgattattagcaataacacatgtataaaatttataaataaatggttgaattgaaattgggaatgcaggttcaaaatatttacagtatggttttctcatctcacaagtttgaagatctctgctctcgaccaaattttctcaaggtgtggtctagggacgcatgtgggaaccaaagacccttttgaggtctcgataagggcaaaattattttcataatacatttttcatttttactgccatacattcatgaatgaacggtggaattttccagatatatgcatgttatcacaacagactaaaagctaaatcagatatgagaaactgtcttccattaagcgagacattaaagagattgaccaaacatgtaaaacattccactattcctaagaagtttttgctctaaaaaaattatgtttctaaaaatatgaaattatgactgttattttgaaattgattaactcatattttaaaatcatcaattttaattttaaaaagatgaatatcagtaaatataacacataaagaatggcttttcaagatcctcagtaagttcttttatgatcgaagagttttaaaatcattactccaaacaaactaatcctatccaccattatttcttggtggtacgttacttgagacagaagcatgcctgaaatattttggtttaaatcctcaaatatgggagttatttaattaggaaataacactatgctctttgactctctgtgtgttggttttaaaaagtatggttcaaataatagatacatattccaacaagaattttaaaagaaaagtgacaaagtcttcaatatctcaaatataagaactcaagtgactaaccctacttaaaattcactttctaggggcaattaatctgtatagcataaacgagattcttttaaaagagaataatatagcccatggcttttcttttcttatatttgctgccatcgttcccagggatatatttaatttttaagtggaaacactgtctaaaatttggttcctagcagaattttctcattcctttttctatattgttgtattagataggagtagaatttattgcaagtgatagaaatagtgtacattttaagaatgtatttctctttcacataatcaaagtctggatttaagtcatctctagctggtttctagtcctcagtgacccagactcattctaaatcattgcttcatcattcataagatgtaaccttcatcttcatagtcaaagatggtggcatttgtgtcctagggaagaggaccaagaaatatacaaagaagatgatagactccatgcaacttgaatcttaaggaaggatccagaaagccgtcatattataccttaaattttatgcattgttcagaacttcatcacatgactagagtgggtttcaaagaagcttgggaaatttagaggatttttttcctaagttgatcatgcccagcataaaaaaagaactattatattcaaagaaggggagaatagtgaaaacaaagcaactattcatctttattaccactagagtccatcaagtttggcaaacaatattggtaaccagcatagtactataatgaacatctcaggtcagttatatcaaaacatcataataaaattctttttaatatataagcaccttttaaaatgtacatatatatttatgtatgtccacttgcttgttactgcagattagtatgtgatcttgtttaggcaataagagatccactgtatgttttattttttttaaataacaacatctattggttttaagtttgtcagaaaaagcaccaaattattaaatgtaaatatttaagctaaaagttggaacaggaagtcctctaggtcaagcttagcacttagatgtgtgtttacttagatgtatgtactaagtacttatcttagtcctcagatgtgtgtccttacttgtttacaacaaatactccttattcccccaggtgactgctatatggatccactaccctatttcatatatttattttccactgtctcaaaaacgctttcctggagaagtccaaagagaacatcaaaacaaatgtgaaaatacgggaacccgagaggtgagatgtgggagatctcacaccaatacttcgatttctaaataaatgtttacagtgatctgacatagaagcaaaatcatgctaacaaataaataagactctcaagataaaaaaaaacatatgtgactttatattagcattttattgtaaatgtggtcagttcactgttaataatcaatataaaatattatttgggatgaaaagttatttaccccaaggaaagaaattgtgtaatttacaagatattttacttcagataactttccacttgtatcacttcctcactcaaataaatatacttccagtttctgtttgcatatttgactcaccagtagaaatcattagaagtaaagaaaaaaatctggatcagagggcttgcatattgttaacattttaaggaacctgagtctagactttaataacaaacaagagtgagaagatcaccaagacacaggaagcatcttctaattaagggcatgtaacattattattgagtttcagacaaaatagttacatttttataaggatatctgtacttactgaaataaatttcgtcaagttttattatgcagctttctctgaaatatgaaaccaaacggcctcatacactattgaagatgtataaaatttcatttgcagatggtgacattcaaactgagaaaaataattccctgatccacaactgaaacatccacttctgaacaccatgtcctactacagccatctttctggtggcctgggctgcggcttggctgtggctgtgactatgggaaggactgtggctgtggctgagtatggcaggtgcagacatggctgccactcatcttactctgccaggtaatgacaccatggattccactgaggaacacctagagcagttcagtctactgcactcctccagcttgatttcctgattctgtttctataatttttcacgtgagtaattatatttgctatacaaactctgatagctcatcctggtgaacttgaagaacacaaagttcagacctgtcatgcttctgaattcatgaaaagagccaaaaattcgtcaaaaattataggtaagttttatctttaatattgtgctaccaataaatttattttatattttcaatcagtatctttcatatgaaaaaaatttaagttctattttaattgattgttttctcatattcaggatggttctactttattctacattaatttgtatagaactgtgaggaactgcttttgggcgctgcctttcatgctattctgagatgacactgtttcaaaaaagataagcataaaatcatcagtccattataataacatgggtataaaagctactttcaaatgtacctacaggcagcattattacctatacataaggaagcaaaatgtcatttgacacaataatagtcccatttcctgttaacatatgctagggctatctttctaaaaccccacagctaggttgtctcattcagatctgtgccttcaggtggatagaaattgtcttttctgctttccacacttcttgctgctcctctcagttctatagcaaaagaggacaacacgtatctcaggtccacctttcacttgcattgggatatattaaccttgttcatccaatttctaatttaaagaaaacaaaactgcttttttgaattattctagcttttttttttttttgagacagagtttcactcttgttgcccaggctggagtgcagttgtgcgatcttagctcactgtattctccatctcctgggttcaagtgatcctcctgcctcagcctcccaagtagctggaattacaggcaaatgccaccaggccctgctaattttttgtatttttagtagagactgggtttcaccatgttggccaggctaatttcgaactcctgacctcaggtgatccacctaccttggcctcccaaagtgctgggattacaggcgtgagccaccgcacctggccttaattattctagttttcttctccaagccaacctaataaggaataggaatctccaattcataaaacgtcagtgaggagcaatgtttctcaacatcctatgtatgattcacacaatattcttaaatatcaatacacgtgatgcaagcactccagagagttcaaagaaaagtattcattatttttaaaacttttaatggcatgatgtgggaaatgtattttttcccatattttaagaagccctattttactacatcaacaactgatttaaaatatcctcctccagtgttttatctgatacagtggatttttctcaaagtctcttgcctaactgacacattctcaagtgatgaataataaaaaaacacattattccacaccctatcattgataaaggatcacagccctgcagctagaatagttgccgcctaataaatattttgaataaataaatgaatgacaatgaatcatgttgaaaatttcatgtctttctagaatttcttattttttatagcagaatgtggaagtaggaatgaactatcacaaaagtcttgatatacaagtaaagttattttgcccagagtattggctgtctgtttgtatgctctgtgtggagtactcgggatagagcatagcttttgcataagaggaaatatggacattcccagtgtctcactcgtctatattatgactgtgaatagactgagaaacaaattatatgcatcgctctttgatcattctgttaaacagatcaaaaccatttcttcaaaatggaatacaataactgcttaatacatgatgtatatatgcattacttcagccatatttagctatgctatccttcaagcaattccatgtgaatatcattgtgtagctatgtttcagtcaactagacacatcactgtgtcttctctattcgtttttttcaaatccacctcttttgcttcttacatctgctatccagcctgtcagtgagaagtacttcaaatgctgttcatcttaaagcctaatctgattgatagcttcttcttggagagaatctaagctctttcactagagagaggtgttctgtgggctggaagcagtggctgatgcctgtaatcccagcactttgggaggccgagtcaggcagatcacctgaggtcaggagttggagaccagcctggccaacatggtgcaaccccatctctactaaaaatacaaaagttagctgggcgtggtggtccacgcctgtaatcccaggtactccgggaggctaaggcaggagaatcacttgaatctgggaggcggaggttgcagtgagccgagatcatgtcactacactccaacctgggcaagagagtgagaccgtgtctgaaaaaaaaggaaaaaagagagaggggttcgctctctgcattaggcacctgcttcatccagttgccttctgaacagaattcgaaactcacatatgtaattatgtgttcctcgtgtccattttcagttgctttattcaaatacctcactccatggtgtgtacaacactgtgccaggttctcaataccagaggaggactcccacttcctggaggataacaaagctcatcccaatgccagcattaggaataaaagtccaaacacttttgcccactgcatcttggtaacagagttgccaagggaaacacaacagcatcaagcacaggatggagcaatgcttttactcacatcagaagagacaaggtgagatcagctccaacagcgtgtgcccatccctcatagctagcgggtccccaggttgccacacaaggcaatgagactatgcacacccttctggagccacagtaaaaggacccctccccatcacccatggagtctgagatactgaaagctaggagcacgtcttgcctgagagccattgacttacaatcttaggcacacactgagcttcaaacaggtaatgcatccctacacaagatgataaacctggcactgattatataggccttttttttttttttttttttttggacggagtctctctctctttcccaggctggaacgcagtggtgcaatctcggctcacttcagactccacctcccaggttcaagggattcccctgcctcagcctcctgagtagctgggattgcaggcatctgccatcacgccaagctaatttttttttttttttgtatttttgtagagacagggtttcaccatgttggccaggctgatcttgaacttctgacctcaggtgatccacctgcctcggcctcccaaagtgcgggattacaggcatgagacaccatgctcagccctgtaggctttttgtcttttggcaaggaagtgttccaggaacaagacccatttttatagcgttaagtgggaatcaaaagactgcatgcaagcgaccagctttcccaacacaccagagcacgaggacagctgtagacactaggaactgtattaggccattcttgcattgctgtaaagaaatatctaagactgcgttacttgtaagaataggggtttcatcgtctcatggttctgcaggctgcacaagaagcactgtggcatctgtttctgggggttgcctcaggaagcttccaatcatggcaaaaggtgaagagggagcaggcatatcatgtgtcaaaagcaggagcaaatgcagagcagggaggtgccagatactttcaaatgaccagctctcatgaccactcactatcatactatcacaaagacagcaccaggccataaggaatctgcctccgtgatccaaacacctctcaccaaggcccacctccagcaatgggtattacaattcaatatgagatttgggtgggaccacatagccaaactatatcattccatccctggcctcccccaaatctcatatccttctcacattgcaaaatataattatgtcttcccaacagaccctcttaagtcttaactcattccagtatttgctcaaaactccaaagtctcatctgagacaaggcaaatcccttgcacctatgaacctgtaaaattgttttttaaaaagttatctgcttccaagatgcaatgggggtataggcattgagtaaacattcccatttcaaaagggagaaattggtcaaaataaatgggctacaggcctcatgcaagtatgaaacccaacagggtagtcattaaatcttaaaaatccaaaataatctcctttgactccatatcctacatccagggcacactggtccaaggggtgggctaccaaggccttggacaactccacccctgtggctttgcatggtgcagtcctggtagctgctctcataggttgttgcagagttcttgtaacttttctaggcatagagtaccatctggagagagatggccttttcacagctctactaggcagtgccccagtggggactctgtgtgaagcctccaatcccatatttcccctccacactgtcctactagagtttctctgtgggggctccatgctgtagcaggaatctgcctggacacccaggctttttcatacatcctttgaaatctaggcagaggttaccaagaatccaccactcttgcactctgtgaaccagcaggcttaacaccattggaagccaccaaggcttatggcttgcaccatccagagcagcagcctgagctatacctgagcccctttgagccaaggctgcagtcggaatagcaggtatgtggacagtgttgtcctaaggctgcacaggggcagcagggccccgggcatggtccaggaaactgttctttcctgctaggcttctgggcctgtgatgggaggggctgccgtgaaggtctctgaaatattcttgaggccttttcctcattgtcttggctattagcacttggctcctttgtaattatgcaaatatctctagtaagtggtagcactacagcctgcttgaattcctctccagaaaaacacttttctttctttggcacataaccaggctgcaacttttccaaacttttgtgctctgcttcctgtttaaatataaattccaactttaagtcatttatttgttcctgcatctgaatttaggctgttaggagcagccaagaccacagcttgtatgccttgttgcttagaaatttcttgccagataccctaggtcactactctcaagtgaaaacttccacagatccctaggttatgaacagaatgcagccaagttctttgctaaggcataacacgtgtgacctttgctccagttgccaataatttcctcatttccatctgagatctcatcagcctggccttcactgtccatatcactaacagaattttggtcacagccatttaatgattctctaagaagttccaaaccttgccttatcttcgtgtcttcttctgagctctccaaattcttccaacccctacctcttatccagtttcaaagatgcatccacattttcagatatctttatagcaatgccccactcctcagtaccaattttcttgttagggcatttttgcgttgttataaataaatacctgaggctgagtaatttacaagaaaagaagcttaattggcttatgataaaaggccctgggcaaatagtgacattcagactgagcatctgggttccctgatccttgactgaacctcccactcctaacatcatatgctactatagtaactaccacggtgccctgggctatggctgtggctgctatctcccatcttgctgtggcagatattaggctatggggctatggatttttttttttttcccagagacggagccttactctgtagcccaggctggagtgcagtggcacaatctcggctcactacaacctccacctcccaggtcccagttcaagcagttctcctgacttagcctcccgagtagctgggccatgcccagctaattttttatatttttagtagagacggggtttcaccatgttggccaggctagtcttgaacttctgacctcgtgatctgcctgcctcggcctcccaaagtgctggcatgagccactgtgcccagccaggctatggattctactaagaaacttctagagaaaccccaggactcctttccctatgttacccgactccatattctgtgttcttctctttttaaaatactgattatctcatcttaggctactttgggaagagatagtagtttaaattctacatccatcatttaaattgaatataatcatctggaataacttactttataaaagaaatgttttctcttcataccgtattacgattattgctccacatacattttagttcaacatccttcatgcgaaaaaaaattttgtgtcagttttcaaaaaaaatcctatatttacaatattacttatttaacattactttgttagacctgttgcatgcacatgtgtgtgtgacagagtattattgtgacaaaaatattgcttacatgctgtgaaactaaaagttcaaaggcttaaaattagttatttctaaatgaaacttgcttttgatgaacctgcaattactgcagccttgcatatctgatcataaaatattagcctatatgctaagtttttacctaatgaataaaaccccacaacagcacccctatttctaatcaccatattctaggtacattggtctttggctgctttcttgtacgctacatttgaatattttggactgtggttgtgtttggaattttcatttcacattattctaaatgatccccttctatttcctagcagatatatttaagtcacatcccatatctaatcgtcacacacaaagtgggtctgaacatcatttttgtctttgagaatctctggaaagtatcaccctcttaccatatcagcacattaaccatacaaaattagatcactgctttctgggaacagtggttttgagttttgtgtttccaatttctgttttaaagatatacaaacaaacttacttttatattgaatacaactttccttcagactctgtttaaagaaaaaatgtcagagttatattatttctacatcattccctttaggattccttttgatctaacattacatattattttgacctttatttgaaattataagctttcgctcaaatgattgatagagttacagcaactttgaaatatcaatacgtctcatgttgcagacattattctttaaaagcaatatgtgtgtccaggcaactgtttcaaaattgcaaatttatattaatttcttaaaatagcttatggtattaaggacatttgtgatttgccataaagttttagaattcatgcccctttttctcagcttataaagcattttaatctatctttccttctgggataaagcaattttctcaaatggccttctacaaatatcctaggctatcttataagagagaaattaaacactagtcagggcacaataccattgacagaattcacatggttcagtaccgaggacagcccccggcaacagtaaggattgtagttattttttttttatataaatgaatgaaaaacaaattaattaatggataaagtttataaacttttgttaaggttttatatgatttccatacttttaaaattaaaaacacgtgcaaaaacatgactattaagatgttcacacatttatctcgctccagagccccaatgcccgaattattttattctgtccaaatggtactattcaaatctttcccagggtaagctcagagaggaagacaaattcactagaagtggaaagtgaggaggagtttgtacgccatcatccttcaccctatattactagggccatgaatacatggaaaacaaatactttataccaaaccctctgatgtttctgatgaaaaaattggattgcacacttaggactgtctaacaaaataaaacaaattacttttaataagtggtttttcatccaattgctcacatgtttctgtacgatttgcctttaaataattgcttcagtagctttcatgaaaatggaattttgtaaataaaacgaaatatcatcatttccattttctggttatagtttcagaagataaatttgaaaccatcaagaaaatatttgatgttttaaaagtagtcagaaaaaggaacactacaaatattggaaggaaaactccagtgaatctggtagcatcaaattttaagtattggctttctgttgatagtctcatgaagccaagtgatatcttttgccttttagtagtaaataattaatcatgtaaaaatgaggatactctcaaggaaaaaaaaggtgggggagttgatgtagcagggaagagatggagaaagtcaagctcaaagaagattatcacgacttgctgaatatcagcaaaaacaataaacttatgtcaactctattgcttgtcatgagtctactcgtgagctgggaagttttctgttcatggatgactccattcatatctctcttgttggccacagattaagtagccagtgctctaagataggaggatctctcatatgtttgaggttttcctggctggaggcttaggtgtctgtttcctatcatgtggtctgttattctctaggaggtttagcaagagttgttcttgtgaaagctgtggaaggattccaaaatagtgagtagaaaagcttaatatctcctgaggtctattctagaagctggcacttccaatgtattttattggccaaaacaaatctcaagacaagcaaggattcaagcagtggaaatgggctgcagtccttgttaggagaagctgcaaaatcatattgcaaggtgcctagatacaagaaagaatgaagaatttacattattttagtaagcaacttacaacaccacagaatatcattaatctctttatataatttgttgggtgggcagggaagcttgagagacatatggttcatcagcatggtaaaataatgtgctctgagaaacctcctatgactaagaataaggagaaaacaaaaaataacaaatttattttgatgtctactttgatttaaaaatcattagatagaacaaactttgtataactaactctaaataaaaaagcatttgtttatttacacattacttataaacatacctatgttgaaaaatatgatatatatatacattactgcaataaacaacagtttaatcagaaaaactaaatgaattctacatattgcaagcagaaaataatacttcatcgtcattggaagtgtaggagaagcaaagatgagagaagacccctattatctcatgcattctttgctaggcctcaaatcaagaaattgcaggaaccagaggaaagcacaattttttttttccttttgagatggagtctcgttctgtcacccaggttggaatgcagtggcgtgatatcggctcattgccacctccccctcctgggctcaagcaattctcctccctcagcctcccgagtaactgggattacaggtacatgccaccatgtctggctaatttttttgtatttttagtagagacgggatttcacaatgttggctaggctggtgtcaagctcctgacttcaggtgatctgccagcctcagcctcccaaagtgttggaattacaggtgtgagccactgcgtgcggccagaaagcataattttcaataggtggacttctctctttccaaggctagtgattcataaggaaatgttcagaggatgctgcaaaaccttacatccatgaaaagccatgaatatcatctgctttggccacagcaatgatatagttttggtctcttttatctttcaaacttcttaaagctactctcattgactgagagtaaacacaattcttgttctgagcaatcaagttcctgagagagtatggaatggtgctaagctgcctaaatatgatcccactaggatttataaaatttgtattttttacagatagataatagttgtacctgtttatgggatacatgtgttattttgattcaagcatacaatgtgtaatgatcacatcagggtaattggggtatctcttatattaaacattttaatttatgttagtaatatttcaatttcactcttctcattactttgaagtatacaataagttgctgtttcctgtgatcaccctactgtgctatcaaatactacacattattccttctatctaactacatttttgtacccattaaccaaccccttgtttatcctccccaccgcctcccactatccttcccagcctatggtaactatcaaactatcactctgttctctttctccatatacaccattgtattaatcactttctccatgaatatcccttgcttccaacacctgcatttggatggtgctagtaaagaacatctcaaatgttaaatttattcatctgaaatacaccatgcattatagttgcctaatacagcctagagtttacatgagtgggatattttttctgtcttcgtaaggtacttctgactcccacaggcaggtgactgccgagtaggactaagacccatcccatggcacttttggctcctttgccttggatcaagaccatgtgggaaacacctttcttcagaactggtagaacaacggtgaggccaaaggtgggtcctcgattccagtcaaggtaggggtagaaagtcattccacacatataccacctcaagtggaggacccaaggagcagatctgagaataccagccaaaacaggtcataggctagtgcgaggagatgaagggagttctgaaggaactatgggagccaaggctctctggctcttaaaaagacacaatgaatgggaggtggaggcaggagaattgcttgaaccagggaggcagaggttgcagtgagacgagatcacaccactgcactccagcctgggcgacagagtgagactccgtctcaaaaaaaaaaaaaaaacacaatgaaaagatggagactcataaggaaaaattctgagtacagaaagtacacaaattaatcatggcaggagcaagaagagagaggtttcagatcttttggaagggaattcaaacagacagaaaacagtgagtactggcaaaatagtatttgggtttatttttcctgttagattgaggattaatgcaaggataatttatcaaacgtgattctgtgagcagtgagggacaccttctcaccattttagatatttctcactctcaacaagcactgcagttgtaatgtttctttgctgctatgtagcccacaccttcctcctggatggtgagatcctgtttccctagccatttcaggccatggttgctgcaatttctcattaacaattatctctgggcatggaagaacacagaacccttcagtgagacccctgaatttcaagtttatttccttgcacataatcatttatgatgtcatctattgtctaaatacaaaggaaataattctgcataagatatattatacttacacagtgaagttgtgatagtatgttcaaagaggcctagtttccataagtatccactttgccatcaatatatattattaataaattatatattatattggtatattacataatttataatgttaataaatatttacaccacagtgatgttgcacatacatacactgttaaattgatggccccattctcagtcctcccaacttaggtgggacagctaatttattcctctactatggactcagtgatatatgtgacttgttttgatcaatgggaggttagcaaacttgatataaatagaagctttaaaaaaagttcatccatttcaaaaattgaaaagcttaaatcaatgctctataatttttaatttgaattgaaatttttagtttgaactcattacttttaatcttttttaaaaaaaaaaaaaacagagggttttttggctctctccattgaaacagcatataagcaatcacaatgtagcaacagtgaacatcactagtgtccagagagtcttctccaaatatcagtgtttctttaaagaaaaataaaagacctcttcctaatcaagggcaggaaagataaaagatgagtctggaagatcttctcatataagaattaaataatttaccgaagatactactaaagtcttgtcaaaaaatacttaaaccaaattaaaaaggtttctaccagcccatgataggacaacttgacatcaaaaagagaaataactataattgatggatacacgtcaattaattaaaacactatgctattgtcataaagacagacatatcgaccaatgaccaatggagcagtatggagagcccagaaataaacccatatatatgcagttatttgatcctggcaaagataattattatacacactagagaaagtgtagtttcttcaacaaatgatgctggggtaactggatattcacatgcaaaagaatgaaattggacccttatcaaacatccaacaaaaaactcaacctgacataaattaaagacttaaatataaagcctcaaactgtaaaactattagaagaaaacatagaagattgttgatattggactgggcaatgatttcttagatacgatgtagtgactacagtttacaatagtgcattgtgcacttaaatatttagggtgatgttattaaaacatctatgaggctgggagtggtggctcatgcctgtaaccccagcactttgggaggccaaggcaggcagatcaccttaagtcaggagttcacgaccagcctagccaacatggtgaaaccccgtctctacaaaaattaaaaaattagctgggtgtggtggtgcacatctgtaatcccagctactcaggaggctgaggcacgaggatcgcttgaacgtgggaggtggaggttgcagtgagcccagatcgcatcactgcactccatgcactccagcctgggcaagacagagactccgtctaaaaaagcaacaacaaaaaaagtctatgagtgcataagaatgtttaagcatattattttcgcaactgctaaattatatactcattctggaaattgataaatgaaaaaatcaactattttcctctcctgaataaactcatagatgagaattttttttctctttataggtttctatcttctacaggtagaagtaatgatagaattgtaaaatcagcattttgaacttctggcaataatgggtctaggtaactattactgaatataaaaaactgtagctaaaaagtttatgggggagattgtaaaatgaacccaatccacaatcccagccttactaaatgtgaagcaatgggccacccagacaccatttacatcctaatattatgtaataaaatgtacacagagcaactataaaatatcactcttgtcaacaaatagtaaaaataaccagaatcacatcaacctttgtcatctacctgtagatggtatgagggatagaggaagatatgaaaagggaaaacaagaaagaaatcagccacgtctaaaatgtaagaattctataggacaataacaaagtttcctcgaaacaataaaatacattaaaaaggaaaaaaaagaaccatcacatctctaaaaagagttaaagacatgcctaaatgtaatgaatgcgtgtcttaatgtaaaaaaaagactatgaaaatatatttgggaagcaatcaaggaaaactgatcacgaattaactattaggggatgccaaataattttgtaatgtcattggtgtgataacggtattggggctctctctatacatatttttttagacttctgttgtgatagagatattcactgaagtacttataagaaaaatgttgtcttgcctgggatttgttttaaaatgttcagcagaactaactaactaactacaaaaaatgtacagggagagaaggaactgaagacagaatattgatgattattaaattccagggatgtgtttataaagcttcaaaatacaattctatttacttttatgtctgaatgaaatttacttattaaagcaaataatgaacaagaaaaaaacttagctgagtatgctaaataaactctattgttaaagttatttttctttgtagaagattctcacataatgtatgcacaagtaatcacagaattttaaacatcaaccttttacaacccattcaatgattaaattagacacaaagttgtcaaatattttaagctaaacaaagtatgagtaagggctttaaaataagaataagaaaaacacattaaaggcatttgatcatgagaaggctgacacaatagcaaagtcatcttgtttataaaggcttcacattgtttaataaaacaaatattcaggaagtatactaatacaaattaatagaaaatatgcaatcaacaggtcctgtggtgggtcccacccaccactgagggtgtatataaaaggactgcctgggcatatagggatattcaaactgaagaaactgattccttgctcctcaaccaaatcctccactcttgaaaccatgtgctactacagcaactactatggtggtctgcgttatggctatggagtcctgggcggtggctatggctgtggctgtggttatggccatggctatggaggcctgggctgtggctatggccgtggctatggtggctatggatatggctgctgccgcccatcttgctatggaagatactggtcctgtggcttctactgagaaatatctggcaactcaacctcgtggtctcttccacatggacttcctaaatttgccttcataattcttcatatgagtaattcatttttctgttgtaaaatgtcaacatcatccttaagtatctggaagaaaaaataggtcagatgctgcaagcctcatctagagtaactgaaatcatttgacatgtttcacagatttttaaaaagctttgttttgatattgtactgtcattaaattgttgatttttgatcaacttatgtgagaagatgtaaaatttcttttaataaacatctcattgaaagtatatttatttgttgcattttaattatgtttattgtgcatgtgtgtgtttgcattttggtgtattggcaaatggaatgggaaagaagaaaatatgagaaaaagaaagaacaattcttcggagcatcccaagatgacagtgatgtttaggctagtccaacttcatgcatatttctgtttttctatgaaattatattttgttttattcctactcttcttagttttagcgtcagtgtttgaataagtctgagtgaatttactatattgtgtgcaatttatcttttatttatgaacctattatcttagcatttgttgactcaaatacctcagatgaaataactactttattggcagattccaatcatgtgttatacttttgtttgttatggggatttagaatcccattgtcctgatgtaaatatttcagaggtatctgttcatcattccaactttggatatattcaattaaaacaattgaatacagttctttggggatacttttaatattttcaaatgaaaatttgcaacattgctacatcttatagcacatgatgctatcaatgagaaaacatcctatagggacacattatcacaataatagaagtaatataatccattgtcttaaaagtgactggcacatagtaggccctcaataaatatcacttaaatgattaaatgtcatttgcttagatgatggaacattaaaaaatctatgttattttaatgaattacattaattcatttgggagcataatataaattgaagctgtgcacacatatacctatatccatgtccagagtctcattgtccaaatgatgacattgtgtataaaggcactactttagggaacctgcttgcaggagacatggagaattcaggcttgggcagctcttttccgtcaaccaactcttaaaacttttccatcaacaactcctatgttatgtagataatggtcactttttttggctaatacaataacaataagattgggctaaactaaaatacccttaaaaagaataaattataattacttgttaacacaagtgaaaaatacattaatacattacctacatggatacttaaattcaactgtaagttagctgctaacattttatttgagtgattagtctgaattataaggtcagtaatattcatgggttgtgcaaccaacaacagaagattgaaaagtccctgaactgcgccattggtgacattcaatctgaagaaacagagtcccttctctttactgaactttccatttctgacaccatgagctgaaatggcaactctctgatgccttgtctctggttctgggctgctcatctaacagtgtaatattctggtcatacagactctatcagggtttctcttgagcaactcaacctgctggactcttcctgttgggcttcctgactccacttccatacccacatcggaaatactaatttcatctctaactactaaagaaaaatgtaactcaaattcagcatgctgtattttgattaactgaaatcaacgggatgtcttgtaatttacagaaaagttatactctttgttttgtattgacattattcctcttcatatatgttcttttctttttcttttttctttctttttttttttttttttttagacagggtgtcactcttgtcgcccaggctggcgtgcagtggcacgatctaggctcactgcaacctctgcctcctggattcaaacaattctcctacctcatcctcctgagtagctgagattacagacacccgccgccaccacgcctggccaatttccttgtattttcggtagaaacggggttttactatgttggtcaggctggtctcaaactcctgacctcaggtgatctgcccgcctcggcctcccaaaggcctgtatgtaggggtggctctcccctacaggcgtgagccaccatgcctggcctgtatgttcttttcatatatttcatatgagaaaataaagtttatgttaaaatgtacacttgatatgatttggctctttgtctccacccaaatctcatcttgaactgtaatccccataatccccacatatcaagggaaggacggggtgggaggtgattggattatgggaacagttttttccccatgttatactcatgttagtgagtgagttctcacaagatctgatggttttgtgtttttgacagttcctccttcacactgtctcgatctctttcttgccatcttgtgaagaaggaatttgcttctcctctgccttctgccatgattttaagtttcctgaggcttccgcagccatgctgagctgtgagtcaattaaacttcctttataaattacccagtctctggtagtatcttcatagcagtatgaaaataaacttacaatgctcctgtaaattttgttgattatacttatattaatttctctctattatttttgctttttctgtttgtgtgcatgtgtgtatgcgtttttcagagtgaagcagcgagagagaggcagagagagagagagaaagagagaaaaagagagagaggaatagagagattctgatatctcctgcagttttgatggccctgaaaatttgttctgaacatcagttccttttacctaaggtcatatgcaatccagttttcatgtgattcagcagccagtgttacatttggtcagacttccaatttacattcatataagaacattttaaatgacatttttgctcagcaaaatagtcttttttcctatcactatatataacaacccctgggtttgtctatttctcaacaccctgagatttggctgaattactttgcactgtgcttcagaagagaggtaattcgctcttcacacctcacgtcatctggatgacatggagagtatagatagaatcccctgtcgagtggctgctgactgcttgatatttgatgttaaaattctcgggaaaggatctgttgttcaccagctcaccaggacagtgtcgaatgcactgagtcactgcctccctcttattccactgttcttcacatctgacagctcctttatttttcttttgaaatccccaaacagcaaatgtgtccatttattccacttgtccttaagaatccccatacattgggaaatggcaatgagacaacagaatcttacgcaataagatatcacttgggcaaaagatgctttgtaattatgtggactttctatttgattttcaataaattacaatattttttcccaaaagtggtttagccatcattggatttaaaaactcaacactattagtgaaattctgagtgatcaacataggtaccaagcatttatttttatttttatttttatttttattatactttaagttttagggtacatgtgcacaacgtgcaggtttggtacatatgtatacatgtgccatgttggtgtgctgcacccattaactcgtcatttaacattaggtatatctcctaatgctatccctcccccctccccccaccccaccacaggccccggtgtgtgatgttccccttcctgtgtccatgtgttctcattgttcaattcccacctatgagtgagaatatgtggtgtttggttttttgtccttacgatagtttgctgagaatgatggtttccagcttcatccatgtccctacaaaggacatgaactcatccttttttatggctgcatagtatgtcatggtatatatgtgccacattttcttaatccagtctatcattgttggacatttgggttggtttcaagtctttgctattgtgtatagtgccacagtaaacatatgtgtgcatgtgtctttctagcagcatgatttataatactttgggtatatacccagtactgggatggctgggtcaaatggtatttctagttctagatccctgaggaatcgccacagtgacttccacaatggttgaactagtttacagtcccaccaacagtgtaaaagtgttcctgtttctccacatcctctccagcacctgttgtttcctgactttttaatgatcgccattccaattgatgtgagatggtatctcattgtggttttgatttgcatttctctgatggccagtgatgatgagcattttttcatgtgtctgttggctgcataaatgtcttcttttgagaagtgtctgttcatatcctttgcccacttgttgatggggttgttggttttttcttgtaaatttgtttgagctctttgtagattctggatattagccctttgtcagatgagtagattgcaaaaattttctcccattctataagttgcctgttcactctgatggtagtttcttttgctgtgcagaagctctttagtttaattagatcctatttgtcaattttggcttttgttgccattgcttttggtgttttagacatgaagtccttgcccatgcctacgtcctgaatggtattgcctaggttttcttctagggtttttatggttttaggtctaacatttaagtctttaatccatcttgaattaatttttgtataaggtgtaaggaagggatccagtttcagctttctacatatggctagccagttttcctagcaccatttattaaatggggaatcctttccccatttcttgtttttgtcaggtttgtcaaagatcagatagttatagatatgcggcatcatttctgagggctctgttctgttccattggtctgtatctctgtttgggtaccagtaccatgctgttttggttactgtagccttgtagtatagtttgaagtcaggtagcatgatgcctccagctttgttcttttggcttaggattgacttggcaatgtgggctcttttttggttccatatgaactttaaagtagctttttccaattctgtgaagaaagtcattggtagcttgatggggatggcattgaatctataaattaccttgggcagtatggccattttcacaatattgattcttcctacccatgagcatggaatgtccttccatttgtttgtatcctcttttttcactgagcagtggtttgtagttctccttgaagacgtccttcacatcccttgtcagttggattcctaggtattttattctctttgaagcaattgtgaatgggagttcactcatgatttggctctctgtcttttattggtgtataagaatgcttgtgatttttgcacattgattttgtatcctgagattttgctgaagttgcctatcagcttaaagtatctcaaaataataagagctagctatgacaaacccacagccaatatcatactgaatgggcaaaaactggaagcattccctttgaaaactggcacaagagagggatgccctctctcaccactcctatttaacatagtgttggaagttctggccaaggcaatcaggcaggaaaaggaaataaagggtattcagttaggaaaagaggaagtcaaatgttccctgtttgcagatgacgtgattgtatatctagaaaaccccatcatctcagcccaaattttctagccctcttattcagaaagttgagcatacacaccagctctctgtcatcaagtgaaggtggggaacataaggttgggcttaagggagttgtgaaagcacaaacaacttacagaagcaattggcttggattctcatggtttcctctctgctgagttgtctcttctttctcaacatacacctatgaatttatgctgattttccagttggagaaggaaaaattagtcctggattatagatggttctgccaatatggtagcactgcctaaaagtggatgactgaagtacaacagatcaaatcggggattaccctaaaggtcagtggtgaaggaaaattttcaattatttttaatcatcttaagaaatgatagtatctagattcagcctgcctttgagaacttaagtctacatataagtacatgatacagacagagtcaatatccctacagaaaaattaatagtcatgccttctgttatatttgggtctcaaaaatgtctactttacgttcctgtgactttggaatcagataagattctcaatgcttttcttttctccgaagaaacatatctacattgcagtgcaggtacaagataatcaaccaaacaactttttaaagaatgcttaaggtgtggagaagaaggaactaaacaggcaagaaaagggcactacttttaagagagcatagcaataggaaaactacagaataatatgtgattggtgggagtttgtacagaataaatcacagttgatccttgaacaatgcagggattaggagtgccaacctccacgcagttgaaaatctgagtataacttttgactccccaaaaacttaactactaatagcctactgttgaccagaagccttaccaataacataaacagttgattaatacatgcttatgttacctgtaatgagagattatactcctataataaagtaggctaaagaaaagaaaattttattaagaaaataaagaaaaagagaaaatggatttactattcactaagtggaagtggatcatcataaaggtcttcagccttattgtcttcatgttgagtaggttgaggaggagaaggaggaggaggggttggtcttgctgccggagtggcagaggtgaagaaaatctgcttaatataagcgtatctgtgcagttcaaactcatggtattcaagagtccactgtatttgctactaagttttatagcgataacatcacagctgtgttgattaagatttaaatatgcatataagaagaagggtattattagcaaagtgatcggaagaggatggcatttgcctcctccacgtgatgtcatccaacatagctacaaaggttaaattcggcatcagtgtgagtaaggtcatggaactcagtatttttttttcctttaaagtctatcagctgtttggcaggatcataacatactgagaagaaaatctcaattttatcaggatagggagtctttttttaaaatctaaagatacaagattaatgagatttttaaatacaggttggtctatatgacaatgtcaggagtgcctgtggtttgtcacacctccactgagactgataaaagacccagtattttagtgtttttatgcactaaaacttatgctggcctctcaggctagagacttaaatcctgacacaatgagctactatggcaactactacggaggactgggctatggctatgactgtaaatatagttatacctctggctttggtgcctttagaatcctggactgtggctacagatgtggctgtggtggggtatggatttgactgctgccaccaatatgattatgctacatgcttattatcaggcactgactgaataatatctacaattgggtccattttcttatgagacaggggtgctgttctactacactttttttaatttgtttaacccaattagaattcttaatgattccctataatcccagcactttaggaggccgaggcgggtggatcacctggggttaggagttcgagaccagcctggccaacatggcaaaatcccatctctactaaaagttaaaaaaatagccaggtgtggtggtgggtgcctgtagccccagctactggggaggctgaggcaggaggatcacttgaacccaaaggcagaggttgcagtcagccgagatggcaccactgcactccagcctgagcaacaaaatgagattccatctcaaaaaaacaaaaataatgcttagttattcaatctaattctaggcaaagaacacacatcattaaattcacactaaatccacatcagtgccccagattaactacatttttctcttccaaactgatgtgttttcataatttaccaagcaaattactttttgatatgtttcaggagtagggagctctaggtttatttttaattaaacttactttggccaggccaatgtcattcattttttaaatttattaattactcacttgtttaataagtcctcattaagtaatttctatatagggcttcctgttaagtcttagtgttacttatgggagaagagtttttaagcagaaaaacaaatgtttaaataaacatgtatgctacaacatgataggtgatgtaatagccacgtaggaacacagaggagaagctcatgtttggatgcaaaagagcgagattgtagagcaaacagatcaaaaatattctcattgaaggttacatttgaataaatttttaaccaacgaaaaatacattggaggtaaagtgtatgccaggcaggggaaacaaatatgcaaagccatgaaaaaagtattgcactgcaaagtcataaattgatgttatttcttgagagaacagtgggcaaagtcactggcaggaaatgaagccctgggcagtgaagagaaactagaacatcaaggccatatatattttgcaatgggtgtactggataatgttttataaagttgtaatattttcctttacctggatgagattggaaactattattctaagtgaagtaactcaggaatggaaaaccaaacatcgtatgttctcactgatatgtgggagctaaactatgaggatgcaaaagtataagaatgatacaatggactttgggaatgtggggggaagggtgagaaggaggtgagggataaaagactacaaatatggtgcagtgtatactgcttgggtgacaggtgcaccaaaatctcacaaatcaccactaaagaacctactcatgtaatcaaataccaactgtaccccaataactcatggaaaaataaaataaaaataagaagcgcatgttttatacaaataattatggcatccaattgaaggaaaggtggccaaggagtatgaccacagaccaaacgaccattctggaggctgtgtaagcagccaatgcaaggtcttaatgtaaaagcggcaactaagattcctatgaaggcctagatcaaatagattattatgggatagaagttaaagaacatgcccatgtggtatgagaatggagggggctaaggaataaaacagagcacaaaataaacaaggacttgaacagtcaacgactgactgtggaactaatggcacatgtgatacgggaatcggaacatttgggggacaatcaaagtggagccgcaaaagtttacttgagtacacgtaaatgtcatctgtgggagggccaaataaagatttttcctggcaggttgttacaaaaatctacaactcaggagaaaactgagttttaaatatagaaaataattggataaagttcgtcgtaacttcagaaatacagtgtattagtccgttctcactctgatctgaagaaatatccaagactgggtaatttataaaggaaacaggtttaattaactgacagttctacatacctggggaggcctcaggaaacttacaatcatggcagaagcggaagaagtcacgtccttcttcacaaggcagcaagaaggagaagaatgagcacaagggggaaaatccccttataaaaccatcagaagtcgtgagaaagtactcgctctcaggagaacagcagcatgagggtaaccaccccatgattcaattacctctctctgggtccctcccatgccacctgaggattatgggaactgcaattcaagatgagatttggggagggggaacaaggccaaaccatatcatagagtattccaataattataggtgaattaaaaaaaaaggtgtttgcaaatcagggaaggagcagataaaagttaaaaaggaaatgaaaagggagtcatggcaggaaaatcaagggcccaccaactttctgggaagagaaacttcttaatcttcctctcttcaaacatggattttttcagaaaggatttctagagtaataacgtaaattctgacgctgagctagatgctgacaattacacggtcagtagtattggcatgttccctgccttcacaaaggttaacatcaagaggggttgacaaaatatcataaatgcaatcacagtaaagcaacagaggccttagtgcttaggtatgggagagtctctccagtcctccatgtgttggtatggaccctaaactccatccacatgattgccatgggagcagcaattttgagtatgatcttcatgccctgacaggagttgatgggtccagatatggccatttgaacaaaatgaagcagaaaattcccagaatttgcaaacaaaagccaatatgttttctacctgatgaagctttaaggtctaacccttgtgatctattagaatagtagctatgtgcttctccttgtagaatgcccatttgaagtttattataaggtacctgcttatgttttctgctgaagaattctatgtatgtgctactcagagttggatcacagaaaatcttttttaacttttgtacactggccatgtcagagatattccatcaagtctaagatgtaagatgttcagcatcctaaaataaacagatgagtgagcttgaaaaccatcactgctctccagacctacacaatgatcacaaatgctgtgctctgttcattcattatacacttgtttactgcagagttaccaactctcaagctggtttgctttgtatgggagtggatagaacatcgttataattgagttattatgcagtatccagaaaccatacttagtaaattgtggcaggaagcttaaaattttctgatagtttagaaatatagcaccatgagatatcagaggggtcattttctctaaagttgtgatagtgataacaggttaagaaaagactgtgaagaaattctctaatacatgacagtctggagcaaaatttctggtttggtagcaaaaggcaattgcaaaaattacaccttaacaaggttgaaaggaaaaatattgacggggaaaacccagaacgctgagttcttccagtctcttttaagagccttaaaacccttaacacctgtgggattgaatcatgtttggctcctaaacagagagattttactccaattccctgtacggaccaaagtggtcagtagatctatagctctaaaaggaacaacagctcaaaacttaaaacattaaataaaacatttacttatatctatatgtctgtatctgtttatgaaatatatacatttatatatatatatcgagagagaaatatggtagataattaagtatccagtcatctggatgggatggggtaggaagatgatgtgtagtgttggattggtaggtggagatgagagagggtaaattggtaagcaaaaggtaagcaatttaagaagacagaaacttaactgaaaaaaattccagaacaatgaatatatcgtgtatatgtttacatttattatgtcatatatagtacacatagagactgcatctaattacttacagcatatccaaaatacataccaagataaaaagggcaagggcctcatatgtgtaatgcaattcttttttgtctgaaacaacaaactccaaacccccatatgtgtgtatgcatgggtggagataaaattgcatatgtatgtatgaggaagtagaaagtaatggaaggtcatttgaagggaatgcctgtgggcagcagcatgagacataactaacaccatctttatgcatatttgtattgctttacttattattacagatgtgcattattttctgaataaagaaaacatcaaatgaatgaaaaatttgaaaataaagggatgctttaaatttgaaaactaaagggatgctttagataatggaaaacttaatcatgaacctatggaattggggaaagctctagggaacataactttattaacttttgcttgatctacaatgtatttgtcaatttttactgtaaaaattgttagtatttgcttagaaacagttgacactttttaatatttatttacatttggtgtacctttttgacatatcctgaagagaagggctacttgctcatagcactccaaacaacagcagatgatagtcataaaatccaaacaaatgaggtaatgtaaaatgtaatgacaatgtaagcataagttttccacaagcataccagatcttattctcaagagagatttcctgcctttgttagcacctacttccaccatgccacattggtatataattaggaccaagattatttcaggaaacataacacaataatttgcatttatatacagctacccagaaacaaagtgtaatgctgtttaaaaccctcaagagttgagcaatgttattagtcaggcagaatggcagttttatttacttgctaagccaattccatattatgaagaactaatgactagagttgatacatactttattagtttgtttctgaaaactctgctagagccaaaagaagaaatataggaagagctctgagcatcaaataggagaaataaacctccagagatcatcagctgacttaattcagtgaagactcccttaacagttgcagaaaactgcacatgcatttaattgcatgctaggtgctttgttgcggagatctttacagattatccttggtagaacgtctttactatagaaaattgttagggagaactacttaaataggtttctggttgccataataatcagtagtcggtttactccttttaaaaaatagtcctgatatacgacagcacaatagttttcacagtataaacaaatcaagcaagcatcattcatttgttcagacaaatatttattgagtgtggtctctgtgcatagtctcagtacctacatggtttaagcataatggtcttagtatctacaattattcttgttattgtgagttatgtttgctctcgccaggtttggttcctctataaaatataagtaacatgaacaaagaatatatctatatttaattttttattttaaaaataaaaatgatatgaataggcttctgtggaattaaccatggtatcaaaaaagaagttatatagtgaaaacctacaacattcttattgctataggaaaaacatatatttggggactgaattctagcgacctacaacccatttggacaattttagcacaaaatagaaaatatacttcaaaatggcatatagtataacataaagataagtgtgaaatgctgtaatatattacagaacataactatcacagaagttcggaggaaggaaaaaatcaatgaaagctagaaaggagtatgatgcttcatagacgggatggggaaacctgaagcataattagagaaatgagaatggtttagattaaaagagggctgaaacaaccaatgtgtgcagcgaaatacactgcatcacctctgcatacttgccaaagtatcaagcttgccttaaaccaagacttacaatctaacctactatttacagaaaataaaggagttacaagaggaacaagttaaacatcatgagtaaacaactaaacaaataaagaatgtgccttattctagaaggcaactggtctaattttttcagcaagccaatggcatataaaggcagagctgttctgaatttgaagagacttaaaatgtataacaactaaatgcaatgtgtggaacttatttgaatcgtgagtttaaaaacagaggggaacttcctcaagttgataaagaaaaaatagctacaagaaacctacagctaacatcatacttaatgttacattgtcattacattttacattaccttatttgtttgtttggattttatgactatcatctgctattgtttggaatgctgtaagcaagtagcccttctcttcaggatatgtcaaaaaggtataccaaatgtaaatgtagtgagaaactcaaagatttcacactaaaatcaggaataagtcaaagctgttccctcttatcacaacttttcaaatgtatgtcctagctaatgccattaaacaagaaaaagaaataaagacatactgataggaaaggaaaaaataaaactgcctttcttcacaagatcatttatgtaggaaatccaaaagaatcaacaagaaaacctctggaattaataaacagttatagcaagattgtaaaataccacactaatatgcaaaagtaaattgctttcctatatgcaagcaacaaacaagtagaatttgaaattttaaaagagaaggaccctactatttactttagcacccccaaaaatgaaatgcttaagtgtaactctaaaaaaatatataccaatctaagtgagtaaaagtccaaaactctgctgaaaaaaaaatcaaacaaaaactaaataaatggagagatattccatgttcatatatgagaagactcgatgttgtcaagctgtcagttcttcccaactttatagattcaatgtaatcacaatcaaattccaacaattattttctggatatcaacgaattgattattaagttatatggagaagcaaaagaccctgagtaaccaactcaatattgaaaataaagaacaaagtcagagaactgacactacatgactttaagacttactacaaagctgcagtaatcaagacagtgaagaaacaaacaggtcaatgaaacagaacagagaacccagaagtagatgaacataaatatagtcaactttctttaacaaagaagcaaaagtaatacaatggtgcaatgataatctttttttttcttttttttttttttgagatggagtctcgctctgttgcccaagctggagtgcagtggtgcaatctcggctcactgcaacctctgcctcccaggttcacgccattctcctgcctcagcctcctgagtaactgggactgcaggcacccgccaccatgcccgctaattttttgtatttttagtagacatggggtttcactgtgttagccaggatggtctcgatctcctgacctcgtgatccgcccgcctcagcctcccaaagtgctgggattacaggcgtgagcctccacacctagccagtgatagatcatctttttaacaaatggtgctggaacaactggacatttgtatgcaaaaacataagtttagacacagaccttataaacttcacaaaaattaactcaaaatgggtcatgggacaaaataacatgcaaaactataaaactgctagaatataacataggagaaaatctagatggcctggagtttgacaatgcctttttagttatgaaaccaaaggcataatctaagaaagtaaaatttgataagctagacttacttaaaattaaaaaaaagttttttctgcaaaagacactataaagagaatgaaaagacaagccacagactgggaaagaagtctttgcaaaagacttacgtgataacgtactattatccaaaatatacaggaaattattaggactcaacaataagagactaaacaacctgattttaaaagtgagccaagactttaacaaacacctcactaaagaagatttacaaatggcaaagaagcagatgaaaaaaatgctccatatcatatgtcataaggataatgccaattaaagcagcaaaaaagatactgctacacacctattggaaaggttgaaacacagaacaccaacaaaactaaaccctgacggaaatgaggagcaacaggaaggttcattcattgctggtgagaattcaaactgatatagcaacttcataagacactctggcagttttttatataactaaatatacccttattttatgatccagcaattgcactccttgttatttacccaaatgagttgaaaacatgtccacaccaaaacctacacatagatgtttgtggtagctttattcatagttgccaaaacttggaagcaaccaaaatgtcttttagtgggcgaattgataaataaaacagtggaacattcagacagtggagtattattcaacacacaaatgaaatgagagccatgaagagacatgaaggaaacttacattcatattactaagtaaaagaagccaatataaaaaagttgtaaactgtatgtttccaactatatggcattctcataaaggaagaacataaaggaagaacagagaagagagagagataaataggtggaggacaaaggattttttagaacactgaaaatactcagtatattaatataatggttgatacatttgtcaaagtttatagaatgtgcaagagcacaggtgaacgcttatgttaaatatggacattggatgataatgatgtatccatgtaggttcatggagtgccacaaatgtacatctggttgaaggcatgagggaggctttgcatgtattagggcaagagatatttaggaaattgtgtatttcctcctcaattttatagtgaattaaatctgctttaaaaaatggacttgtaaacacaactaaaacaactttttaaaataattaggaatttttaactacttcattagggatgtaaagaaaatattaatgttaccagcaaactgtcacaaggacaaaaatcaaacaccgcatgttctcactcagaggtgggaattgaacaatgggaacacttggacagaggaaggggaacatcacacaccggggcgtgtcatggggtggggggagggaggagggatggcattaagagatatacctaatgtaaatgatgagttaatgggtgcagcacaccaaaatgacacatgcatacatttgtaacaaacctgcacattgtgcacatgtaccctagaacttaaagtataataaaaaaagaaaatattaatattgctattataataagaaaatgcccttagttttagagatgcataatgaactatctcgaaatatgaaatatcacaatatttgtgatttatttttaatatttcagaaaaatgatggtcaagcatttcaaaatgctaatgagtgttaaaacaaggtagtaaataaaaaggagcatggtattctatttttctgctaattaaaagttttataatgaaaagtttataaagcatagcaaaaggagagggcattcatgaacgagataaaatgagcaacaagtcatgagtgggactattcacgtcctagccacagattcataaaacctttactgaagctgaggatttgagaaaaagattcacgagagctaaactggaaaaggtagacatgggctatcattactgaagacctacatctgtgaggattacatttccaaaaaagacgatgggggaaggtgaatcatcatggaattttgagcagtgagatttttcatttgttgggttggcttggtttaattttcttaaaaagattaaatagcttatgggttagtgaaatgaatcatgaagaaaaaatacaaagtaggagaagaattaagagattgctcaaaggacctagtatgtatttattgaagcagaggctagggaaatatgaatcaagagaagaatggaaagacatcaaagataaattaatggggctcagacatgagaaggcatggggataacaaataaaatgtggccataaattattttgagatttcaagccattaaccattggagaaagaagggagaagggtgaggtcaattgtctgcagcaagatctggtgcccataaataatgaatctgattgtagacaaatgtgaatgtcctactgaacagggattcactatcagccacttggctttgaaaattctgaaaaagccttcagttttgaaactctaaaaagcattttactctactcccttttaatcaaactttatgtcaacaagtagtattcaattcccttattgtctgtcattgtcctgtaacttagataaaactgagaaatatgtgataaaccataaaaagtaattttaatttgaatatgattgaccaaacataaaaatcccttactgagcaatcataacttattctttctggaatttcaagtgatttgaatatcctctacaattgtccttttgaattttttaatattgtacttatttgattaatatacttacttctctttatatatttactagctataccatgctccaatctggaccaaaaagataaatagggcataaccaagtcttttgcatttcagaggcagacatataaagaaatgattgcacatgtgtgtgttagttttcaaagagtggtgtacgtagtgaaaaacaattaaaaattgctttatgggatgttacggtaggcattataggggcctggcttttaaaatattagaggatcttctggcatataaagcctttaagaacactctagtctaatggtattccctatttttgtgtttttagcatacatgtcaactcggtagtccctctaacagacatgatgaggatcaagagatagcctccattaagatcattataaacatgtcatataaattaaactttatcgacttatatgtgaaggttatgtggtacacagtgctatggtacatacttattgagaactcatcctatccagaaaggcaaattagttatcagaacattaggagagttcaatattaaaactttgtaaaaaggagagttatccaattaaactatgaagttagaaatgtcttcccagaggaagtaaccagtcaaattatagatgcatatggctccaggtatttggacaaagatagagaaggcactttggccaaagagaaaagcccattgtaggtaggaaatagtataatgctagaaaaatttaaagtaactcactatggttacaacagatgaatggaatggaataggagcagcagcagtggtagctgagctggcacagattttttttaaaaagcagcaatataagcataaaaaatggtgcacaggacaagcatcatgaaaagaacactgaaatcaatggagatgcctagtctggtttgtgggaaaagaagaaagaaaaacaggggtggctaccacacatactcaccacatcagtatgtttctatttccactctttcacagcttctgaattttagaatccaagtatggacatcggttaacttattatttaatagttttctgtgttaacaaaatgattttttattttatactaaaagttatagtctttccttgaagaattttaattgtaagtgtggcatactcagttttgcattttaaaagaacactataactgcttgtatgtgtttatgtggtgttatggtagacaataccatagctcacaatctatttcaataatctaccataaggtgacaataaaaactaagctaatgtctttgaggacatagaatttattggacttgaatgacagtgcattctctcatttaggtaatataggtgaagaaagtgctaatttgagagtatttgggagacagaaaaatgctgagatggaaagttaacttttgaatacattgagtttgaagtacttatatatctaaatagatttatcaagaaagcatttccaagtgatgtcagcaggaatggcagaatatggaactctgaaaatctatcctaaaaaaaattaagacatttttatataatcataaactgaaagaatctatagttagcataccttctctaccaaaaacaaaaacagaaaaagactaaagagagtactttaggctgcaataaaaggacactagatagtaactcaaattcgtatgaagaaatgaagagcacgagtaaaggtgactacacaggcaaattaaaaggcagtaaaaatgtaagagaaattagaaatactttgatatgaatgaaaactaaaacacaaaataccaaaacttttgacatgcagctaaaacagtacatagaggaaaagttatatgtatataaatacctatactttaaaaataaagatattaaatcaataatctaacattctaacttaagaaagtagaaaagacaacaagaactaaatccacaactagcataaaaaaggaaatcattattcgagtggaaataagtggaggacagtaaattaatagagaaaatcaacaaaaccaaagttgattgtttcaaaaaaatcaacaaaatggacaaactttcagctagacaaaccaagaaaaaaaagattcgaattactaaaataaaaagttattaagattgcacatgaagggaacgtcactgacttacagaaataaaagggattataagggaatatcataaacaactttacatcaacaaattatataactcgtataaaatagctcaatcccttgattgacacaaactactgaaattaagtcaaggagaaatagaaatttgttttgatgtataataggtaaatagatttaattagaaattttaaaatttccccccaaaaaagcccagactcagatggcttcactgttgaattctaccaaatatttacagaagcattagcatcaatctacacaaactcttccaaaagttagaagacagaacatttcccagctcattccatgagtctagtataactctaataccaagactgggcaaaaacagtagaaaaaaaagaaacctaagactaataagtctcatgaacttagacgaaaaacgggtcaacaaatactagcaatccaattccaccaataatatataaataacattttacactgtgaactttacacaagtgggatttatcacataaatctgaggttgattcaacaaataaaatcaaagaatgtaatacagcatgtaaataggacaaagggcaaaaaaaaaaaaaacccatatgatcatctcaatagatgcataaaaaactcttggcaaaaattcaacacactttcataataaattacattcaaccaaaaagaaatggaagaaaactttacaacttggccgggcgcggtggctcacagctctcagtggagctgagatcgcgccactgcactccagtctgggcgacagagcgagactcaaaatcaaaaaaaaaaaaaaaaagaaaaaagaaaactttacaacttgataatgagtagctataaaataccccacagctaacatcaaagttaatgttaaagctttccctgtaaggtcaggaataagataaagatgttcaattttgccacttctattcaacaaactactagagatcataacaagggcaattagacataaaactaaatacaaaggcacccaaatttggaaaaaagagaactgtttctatttgtattagacattctcttttatgcagaaaattctaagaaatatacatacacacacaattagaactgataaatgaattcagtaacattgcaggacacaagacaaatacataaaaattaattatttctacatactttcagtcaacaatttgaaaatgaaattaagtaaactgcaatagcacaaaaaaagagtaacatacagattttctttttaaaaaaaagagtgtaagactcacacactgcgaactacaaaatattgctgaaagaaattacagaagatttgtatcatttatttgggttggtaatattaaaaatcctctcttctaggtatctgaaaaaaatacaataaattattgtttactatagtctcccgacagtgctataaaacactagaacttattcttcctatttagctgtaacttcgtattcaccaaccaatctcttcctatccctccttctcagtctctagtaaccactattctactccttacttctactagatcaaattcttcaactcccacgtataagtgagaacatgcagcatttatctttctgttccttacttatttctcataacataatgtccttcaggctcattgatgttgctgtgaatgaccgaattttattatttttatggctaaatagtattttattgggtatatatgtgccaaattgtcgttatccatacatctgttgatggactcttaggtttattctatatcttggctattgtgaataatgctgcaataaacatggaagtgcagacatctcttcaacctactggttccttttctttggatatatacccactagaggaattgctggatcatacagtagttctacttttagctttttgaagaacctctgtactgttttacataatgactctaacaatttacattcccatcagcagtatatgagtttccttttcttcacatcctcaccagcatttttttaaatcattttaataatagggaaagatgaccatcaggattgaggcgatggatatgataattacccagatttgattattacatgttgcatgcgttgatcaaaatatcacactgtataccgtaaatatgtacaattattacatctcaactaaatatatacattaaaaatatggaagatctaaataaatacaaaaattccatgtcatgaagtggaagaaaatattgttaaaatggcaatacttctcaaattgatctgcagatttaacacaatctctatcaaaattccagatgtgcatattatagaaattcacaaattgaatataaaatttacatggaattgaaaggtacctggcatagcaaaaataaaaataaaactttaaaagaagttgaagtcttgctattgtgaatagtgctgcaataaacatacgtgtgcatgtgtctttatagcagcatgatttataatcctgcgggtatatacccagtactgggatggctgggtcaaatggtatttctagttctagatctttgaggaattgccacactgtcttccacaatggttgaactagtttacagtcccatcaacggtgtaaaggtgttcctatttctccacatcctctccagcacctgttgtttcctttttaatgattgccattctaactggtgtgagatggtatctcattgtggttttgatttgcatttctgtgatggccagtgatgatgagcattttttcatgtgtctgttggctgcataaatgtcttcttttgagaagtgtctgttcatatcctttgcccacttgttgatggtgttgtttttttcttgtaaatttgtttgagttctttgtagattctggatattagccctttgtcagatgagtagattgcaaaaattttctcccgttctataggttgcctgttcactctgatgatagattctttttctgtgcagaagctctttagtttaattagatcccatttgtcaattttggcttttgttgccattgcttttggtgttttagacgtgaagtccttgcccatgcctatgtcctgaatggtattgcctaggttttcttctagggtttttatgattttaggtctaacatttaagtctttaatccatcttgaattaatttcccaaatgtccatcaatgatagactggattaagaaaatgtggcacatatacaccttggaatactatgcagtcataaaaaaggatgagttcatgtcttttgtagggacatagatgaagctggaaactatcattcttagcaaactatagcaaggacaaaaaacctaacaccacatgttctcactcagaggtgggaacagaacaatgagaacacttggacacaggcaggggaacatcacacaccagggcctgttgaggggtggggggaggggggagggatagcacgaggagatatacctaatgtaaatgacaactttatgagtgcagcacaccaacatggcacatgtgtacatacgtaacaaacctgcacattgtgcacatgtaccctagaacttaaagtataataaaaaaataaaataaaaaaataaaagaagttaaagtacttatacttccttattcaaagacttaccacaaagccacattaactatgtgatactgacataaggatagacatatcaatcagtggaataagggaaagtgcccagaaacaaacccttacatttattatcaattgatttttgacaagagcgtcaggaccaatcaatgggaaagaataggcttttcaacaaatggtgctgaaacaactgggtaatcatatgcaaataggtggagttggtgtctatctcacatctcacgccatatgcaagaattaactcaaattttaccaaaaacctaaatgttagagctaaagttataaaactccttatattagttgttctcacactgctaataaagacatactcaagactgggtaatttataaagcaaagagatttaatggactcacaattccatatagctggggaagcctcacaaccatggccaaaggcaaaggaggagcaaagtgaagtcttacatggtggcaggcgagagacagagagcatttgcaggggaagcccaccttttaaaaccattagatctcatgagacttattcactatcatgagaacagcatgggaaaaacctgccctcatgattcagttacctcccaccacatccctcccacaacatgtggagctacaatttgaaatttcggtgtggacacagccaaaccatatcattctttaaagaaaacacaggtgtaaatgttgatggcctgggagttgccagtcattccttagataggacagcaaaggtacaagccacaaaataaaaagtaaataaattgcactttattaaaattaaaagcttttctgctttaaaggaccctatcaacagagggaaaaacaaacaatagtaaggttccagaaagtatctgcctttcatatattctataaggaatttgtaatataaaatactcttacaactcaaaaatgaacaatattaaatagtagacaaaggatttgaacagacagttattcaaagaagatcttcacatggttaataaacacatttaaaaagctgcacaacattattagcccttaatgaaatacaaatcaaaatcacaatgagaaaacacttcgcatccagtaggacgtgtataatcaaaatgacaaagaataacaagtattggcaaggatgtggagaaattcaaggcttatacattattggtgggaataaagaatggtaaaaccacttagagaaacagtttgactgctcctcaaaaaattaactaaagagtttccatatgacccacgattccactcttaaagactttcacccaaaagaattgtaaacatatgtccacacaaaatattacgtatgaatgtttgcagcagctttatttataatagccaaaagtagaaatcatccaaatgtccatcaattcataaatggataaacaaaagtgacaaattcatataagggaatattattaaaccacaaaaaataatgaagtaccgatatgtgctaccatgtggatgagcagcaaaaacatgctaagttaaggaagcaagatataaaatgccacctgttacacagttccattggtatgaaatgtccaaatacttagagacagaaaataaatttgtaatgactaaggactggaggaaagtgggagtgcagcatgactgctaacaagtacagggtttctttggcaactgatgaaaatattttaatattagatagtggttatgttttaacacccctgcatgtattagtccattttcacacagctataaagaactatctgagactgggtaatttatgaagaaaagaggtttaatggactcacagttctgtaggctgtacaggaagcatacttgggaggcctcaggaaacttataatcgtggtggaaggaaaagggtaagcaagcacatctttactatggcagatcaggagagagaaagagcaaagggggaagtgccacactcttttaaaccaacagatcgtgggagaactcattcactattgtgggaaaagcaaagggggtgctcgcctccatgattccatcacctcccactaggccactcctctgccacgtggggattacaatttgacttgagatttaagtagggacacagagtcaaaccgtatcactggatatactaaaattcacatataaagcgcactgaattgtgcactttaaaaggctgaatttgatggtgtgtgaatcatttcaagtttttaaagcaataccatgggtaagtttgaaaaacaggaaaaacaccggacagaagatataattttttggaggaatcagtggatgataaaaagttgataaatatgtcacttttttgtaatatccctatttatttgagggacgattttgcccccccgggggcatttgacaatgtctgaagacatgctcagttgaagcaacttgagggtgttactggtatctaatgggaaaaggcaagaaatgctgtcctacattttacaatacacaggacagcctccccaacaacaaagaattatctaacttgccatgcctatagtgctgaggttgagaaactgtgaccaagatatagtgatttgtacatacttaaaattcacctaaatttctgtattgtaaaatagaatttacttgatgatgttaatataaacagcagggtccagagaaaatttagaatagtttattcactagctagtaagtctcatggaggagaatgacaagaacactgcttatactaatttagctaaattatttgtaggccataggagtatatattacacatatagaagtcactttcctccctctatgtgagttgtgctagacatgctccctgtacctccagagatccaccctttcccctttcctccttacataatgtgtctggaaagtcaccttcacccatcttatcaaggcccccttgctctctggtttcccattatgttcaattaattggaaagaccagcaggagaactggagagtctgagtacttatgtccctggttctctctctgcaaggactctgttagttggtggttgcatttctctacctaaggaaacagcatttggggtgtccactcatcttcactgacagatctcactagattctggagaccactcccttcccttggaacctcagacataggcatggtggagacttcctacagttcctagccctgagtgcttaatcatagtttatgggtttctgctgtgatctgaatatgtgtcctccaaaattcatatattaaaatttaattgacaatgtgatcatcttaagaggtggggcctttcagaggtgattagctcatgagggcttcatttttgtgaaccagattaatgctcttatttttaaaaaacaagagcaggtcacacagagtttgtccatttttgcccttccaccgtccaccatatgtcaagccaaacactgaatttgctggtgcattgaccttggactttccagcctccagaaacatggaagataaattgctattgtttataaattacccagtttgtggtatgttcttatagcagcaggtttagaccaagacagtttccttagatagccaccctccaccccccggaaaaaaatttgtatacagttatctttacaaaactctcttcaaatgtcccctttgagcacatcatctcctcctggccaagcttttgagtgacatagtaaagcttgtttttaatgatcccactatctttttaaattaataatcctatagccaggactgtggtagaatgtatttttccaaaagtgactatggcacccctatacccaatgagtattcaagtaccatgccaccctgaaatttatacctaagctttggctgacttttgtttaagtcttataatttcaaatctttatttacaaggtttggttctttgtatattactctgcaaagtctgtgtaacatcaacactacaggatatgccactgttaaaggtacatagttaatactagattaatgcttacaagttgattctttaaaattatttgagcttatttttctggtaaaagataaatctctttagaaaaatacataatccaattaaatggtattaaaaatcaatgaaaacaaagaagatacaattaccaataatatcttagattctaatggctattattttcaaattgtaccacattttcctaaatatcttcccatgaatgcctaattaggattatttttgcttacaagttatttttaaattatttttctttgtgtcatttgttttattgttttatttataataaactttgttatttttagaataactttaggcttatagaaaacttgcgaagacagtgtggaggttcctcaaatatctcacaccctatttcttttattaccaacatcatcatagtgggttgaatagtggccccagaaagatccgtccaaatcctaatctgtggtacctgtgtaagtgatgttatttagaaagaagatctttgcagatgtaattgttaaggattttaagacaagatcttcctggatctagggtgagccctaaatccacagacactttttcaacagcctcaactaatagaatgaggcaaaactgccactataggacttccaaggcgaagtcagaaaaagcagtgttgctcatgcctgctgtctctcaggatgctcctttttagaattcagccatctcacactgtgaggaagccaggcagtaactgagacaccacgggtcagtgttcctgctgaccactgtagtctcagcccacagcttgcatcaaccaccatacattcgggtgaatgaatcctcagataactccaaatccaagagactttaagctactcaagctgattcctactggagtgaagatgagctgtcacagctgagccaaataaagaattgttgttctttatgccagtgagtatgtgctggcttgtcatgtagcaaaacaaaattggaaagagcacgtaatgtgtctctgtgctaagtacaaaaagacccctttctccaggctgatatagtttcatagcttggcaaatgaagtagggtcatttcaagccccactcacacccttgaatgggtaccttgatgaagacacaacctgcccactatactaagaggtgacacatgtaacacaccaaatgtaaacaggtcttgttcaaaaaagcccgttcgggttgctccttgacttatattttctacccagtcacagggatctcaccagtaactgggtctacctgattacgtttctcatatggatctctttccagagagcattatacaaagagataaaacaattaatggaagtttaaaaacacaatataatcagttatattcaattcactgatttgttattttaaatacaaacataatataaatataacaaaatcttgatctatggcggtatggatctgttgttagcttctggcgccatattccgaaaatgcagtggatatttagaccagttaaaattagtaaaagggctactgtcctggttctttatggatttatttcttgttttgagtgtctgctcttaatcattcttcttgcctcttcaaaaactctatgttctgtgttttaaatctattcacatcagttctcattaaactggtcaattcctggtatcatttctgacacactaatgatagaaatgctcagtttcaagcattttctcagtttccagatgtcattgattcacaggatttctatagctctttacatggtgattattattatcttggattgcatgactttaagcaacgctgaaatgtaaaggtgatgattcggctcagaaaagtttttcaaaattgcctactgcatctgcctaggaaaagctttctccccacctagtgctgtgaccaccaagactttccaaagatcaggatgggtttttccccggcggggaagctactttcacgtggaattcattctcagaaatacttccctatcactcaatttttcccgtaagttccttgcaacaacagccaccagtcttgttattactttccttgtcacgtacttgaatattctccacccagaggaattttttaatccatgtatctatgcaccacgtaagcaatgataaaatatccacataaactctggcagagcctgtcatcttgtagactcatgggtacttatcattttccacggcccaatgttgttggcaaactcagtattttgcagaggacttaacaaaataaatgcatatgaatctgtcttcaatgtgcccttatcttagagtatttctaatgggtctcaggctaactcacttttttaagtttctgcttcttacagagaatatttattcccaacatctcaacttacaaatgctgaattttatatctcttcatagtttttctgtacattttaaaaatgcaacatgcctgcattgtattgtgtgaagctggaatcattatttttagggaacagtatctcaacaaaaataaaatccaacactctcaactgaagaacattataatacatcttaggatgactgttttagcttgatatcatgagatggtattaagaagcagtgtgagcagaactgtatttgaaatttatcctcatcttttgactgatttaaataagttacctctgctttgaatataaacgagtcagcaggcataattcctgtggttagctgagttacccatccctaggaaggaacatattcagtttatacatgaatctgtagattcatatgtaggctatggatttttcattttgaattataggttacacaaaaatgtataaaactcaatctttttgtttttatgtggaatcccaattttgccataaggattccagtaccatcttaaccttttgttactcatatgtagcagaattaactattgttttgacacaaattagtatatggaattatacattagagacctggaattttccatagccacccttcgtagtatagaaaactctcacatttggtaataaaatttgcacattgatcctcgctcaaaaatcatcttcatattccaagactatgctgaagctattacaaaaactgctctggggatcatggtggtgagtactctggcttaggatgtgggagcttagagtatgggacttcagaggccaggccaagtcagtgagtatggttccaatgagtgtggctgttgtcacccattcttctgtgagaaaacaagtcttgtggcttctactgaaaactttgatagctcaaagcgattaccatgagattaatcagctcaatttcaaatgatgagaaatcctcttcttttcacccaccgtttatagaactggtaatcacctctacatcgctgagtaactctccactgctggccacaattaacatgggagttagcctacatcaatcatactgatcagattctctgacatctgaaacatttgaacatttgaattgcaaatctcaacattttaattgcagctcctcttgtcaacttatttttcactctaacatcaactattttttctgcattccatgtctcagaatgcttacattttcactttttcaatagaaatgcttaatctgccctaggaaatattgttcttatttgtgtttattcagttcagtaggcttttgatgtcacaggtacattatttggaactcaaacataaatttctcttcacttgcagctgcaggtaatttatcccctaagaatggctgagtatatgtatgaaaaagttgagtcacctaatatcttgtagcttcttataaaagaagagatgaaatttggcttcttgtttacttttgcctttttcatgagaaaatgtattttcctcttattcttacattcaaacacagcagatgcacaggagattttaaaagccagagatagtaaacaggaagaacagtcttgccttagtttcccatggctgcagtaacaaagtacccaagctggatagatttaaacaacagagatctattttctcacagttttagaagccagaaatccagaatcatgttgttcaaatggccatgttcttctgaagaccctaagggagaatctaccccatccctttctcctagtttctgctgttgccagcagaatgctttgaattctttggcttgtagactcattactccaatcttgccaccatcgtgatatggcattctctctgtgtatctctgcatctcttctcttcttataaggacatcagtcagattgatttagggccacccagagtacgacctcatcttaacttgattgcatctgcaaaggccctatttttctaaataagtcctatgcacagtaccaggggttaggaacccaaaatatctttttggagaacacagttacaacccacaataacacccatggttattgagagtttctcaaaatattcaacctcagaatgagcgaaaagggcagatctcccctcgtatatttgcttctgtgagaattagggaccacttgtactattgaccaagaataagtaaaaaccttaagacatcaggaaaaagaagcacacactgtatctgtcttggaaaataacagtgctaaggcatcaaagtctactgataggaaaaattaatgactataagcctatgaaaaacaaaaataccagtttggccaactgcctgagaccagggaattaggaatcaggctgacctggcttcaagtcctagctctgctatttagttatctgtataattcctaatagctggttttactaaattttcatttatttattggtaaagtggtgataatatgccatcttcactgagtttttgtgaaaaataaataggttagtacctgtaagatgcttagtagactggctggcacataacagcactcagtaaagatcatatacatctatgtttatcttcccacaaagtaataagctaaagataattaaattatctattaatcagagttcacaaaaaaaataattttaaatgatccaggtatatgatttgcctgtgcctccacccaaatcttaattgtaacttttatatttcccacatgtcatggggaaaagccggtgggaggtgattgaattatgggggcaggtctttcctgcactgctctcatgaccagtgaatgcgtcccatgaaatatgatggttttaaaaatgggagtttccctgcacaaactctcttcccttgtctgctgccatgtgagacatgccttttaccttccaccatgattgtgaggtctccccagccacatggaactgtaagtacaattaaaacctatttttcttcccagtctcaggtatgtctttatcagcagtgtgaaaacaaactaatagagtaaattggtaccagtaaagtgaggtgctgctaaagatacctgatagtgtggaagcaactttggaactgggtaacaggcaggggttggaacagtcaggagggatcagaagaagacaggaaaaatgtgggaaagtcagaaacttcctagagatgtgttgaatggctttgacaaagatgatgctgatagtgatatggaaaatagcatccaggtcggggtggtctcagatggagataaggaacttgctgggaattggagcagaggtgacccttcttatgttttacaaagagactggcagcattttgaccctgccctagagatctgtggaactttgaacttgagagagatgctttagggtaactgtcagaagacatttctaagcagcaaagcattcaagatgtgacttgggtgctcttaaagacattcagttttaaaagggaagcagagcataaaagtttggaaaatttgcagcctgacaatgaaatagaaaagaaaatcccattttccaaggagaaattcaagctggctgcagaaatttgcataagtagcaatgagctgaatgttaatccccaagacaatggggaaaacatctccagagcatgtcaaaggccttcacggcagctcctcccatcacaggcccagaggcctaggaagaaaaaggtgatttactgggccaagcccagtgtctctgtgctgtgtgcaacctagggacttggttccctgtgtccaagccactctagccatggctgaaaggggccaatacagagctcaggccatgacttcacagggagcaagcctcaagccttggcagcttcctggggctgtgaagcctaccagtgcacggaaatcaagaattgaggtttgggaacctatgcctggattgctgagcatgtatggaaatgcctggatgtacaggcagaagtttgttgcagggtcagggcactcatggagaacctctgctaaggcaatatgaaagggaaatgtggggccagagcccccacacagagtccctactggggcaccactgagtggagctgtgagaagagggccaatgtcctccagaccccagaatggtagatccacagacagcttgcaccatgtacctggaaaagctgcagacactaaatgccagcccatggaagcagccaggagggaggctgtaccctgcaaagccacaggggcagtgctgcccaagaccatggaaacccacctcttgcatcagcaagacctggatgtgagacatggagtcaatggagatcatcctggagctttaagatttaactgccttgctggattttggacttgcgtggggcctgtagcccctttgttttggccaatttctcctatttggtatggctatatttacccagtgcctgtacccccattgtgtctaggaattaactaacttgcttttgattttacaggctcataggtggaagggacttgccttgtctcagatgagattggaatgtggacttttaagttaatgctgaaatgagttaagactttggggtactgttgggaaggcattattggttttggaatgtgaagacatggaattttggaggggccaggggcagaatcataaggtctggctctgtcctcacccaaatatcatcttgaattgtaactcacacaattcccacgtgtcatgggaagaagccggtgggaggtgattgaattatgggtgcgggtctttcctgtgttgctcttgtgatagtgaatgagtctcatgagatctgatggttttaaaaacaggagtttccctgcacaactctcttctcttgtctgccaccatgtgagatgtgccttttacattccaccatgattacaaggcctctccagccacatggaactctaagtccattaaaacctctttttctttccaatctcaggtatgtctttatcagcagaatgaaaacagactaatacaccaggaaaaatgtaactcaaattataatgtgtcttatatgtttcttagaattttctgttttatctaactatacatatccctctgcagtattctaaaaaaccagacctatttaattgaaaagtacagtcctataactggatactcagtatcactgaaataaatgaataaattttaactggtaattgaaaaagaattattagttgcagctcatgatgatgatgatgactatgatgaaatcagaaatttccacatgatctaatgattgtcactgaattactggcacagctaatatatatcatctcaagaaacctgtaccctttccttattacagtgttccattcactgtaatagagcttcccaggaacaggctattcagtacgtatgtgctggacttctcaagcatctactttcatgagccatttaatctgtcctactatgccacagagagcttagcacacgtgaaactacttgagggggaaaaagacgcaatttctatgagcatatcaaattccacccaaactgacattggcagatcatagcgcactacagaaacagatagtatgggcaccaaacccagaataagaatctgtgatatttgttagaaaacaggacacataagctaacttttcaatgatgagcaggagttagccaacatattagtctattatgttgctgataaagacatacccaagactgggaaatttacaaaagaggtttaatagacttacagttcctcatggctggggaggcctcactatcatggcaggaaggcaaggaggagcaattcatgtcttacatgtatggcagcaggcaaagagagagcttgtgcagggaaattcccatttttaaaacaatcagatctcatgaaactcattcactatcacaagaacagcacaggaaagacccacacctataattcaatcacctcccacagggttcctcccatgacacctgggaattgtgggagttacaattcaagatgaaatttgggtgggggcacagccagaccatatcattccaccctggaccctcccaaatctcatgtactcacatttcaaaaccaatcgtgccttcccaacagtcccccaaagtcttaacccatttcagcattaactcaaaagtccacaatccaatatcttatctgagacaagacaagccccttccacctatgagcctggataatctgaagcaataaaacttcatcaaccactgcagttcctttatgtgacatgaaaacagatccctgtgggaattacagggtcccataaaatataaaagactataaagtttttgatgtgtgttaatgaaacgaaatgtctggtttgcttacctaggtaagtttattaggaaactgatttagattcactcgctcacagatataacaaaacataaatgatataactaacacaactagggggttataaaaaccaactttacttatttgagagtaggtttttcaggcagtctgatttcaaagtatctcagggtggaagactatggttgtggactctgctccttaactgctaaggtgaggacaagagaaagggaagctgtaagaaatattaaagcatcaactatattgcagaagttttacatcagagtacatcataatctggaaatataagaagctacataactaataaggtagaaaatgattgcttaccttgtcaagaaatatggatgccactgtaactacagttggaggcataaccacaaccaggtcaccaaagattccatggtcatttaatacccaggtgtcacaaaatccatagacattcctatagacagagccacatgcacattccccatagacatttccttgtgtggcagacagacttttgaaatgactcccaaatgatcctcacttcctgttatacatactcttgtgtagtccccttcccttaagtgtaggatgagcctaggttcttgcttctaatggatagaatacacaaaatgagacgggatgtcactttgaagattaggttttcaaagactgactttcatcttgctggcactctctttgactcttttcatgagttctttgatggagatgcccacatggcaaacaactgtggttagttaggaacctagggttccagtccaacatccttcgaagaacttaattcttcccacagccatgtgagtgagcttggaagaggattcttcccctgtgcagacttcatttgggactgtagcccaagccaaccgctagcgaaagcctttcaagaaactctgaaacagataacctagctgaaccatgccagtattcctaacacccagacacaatgagataactctgggtggttttaaggcactccattttgaggtgacttgttacacagaaataggtaactaatacactttggtaattacaacctatgatgtcaggattaaaaaatttagtcagacaccaaagaaaaagttatttgagtttaaatcccatcttcttcagagatcatatatttaatttcaaaagtgattttcatgcatgaacattgcttcactctggataggttggagtactttgtaaactttcactgccctagaataagagtgaacagcccagtttctggaaaaaagcacagctcaaacccagacccaccacttgttagattcttaatttctttcttcttaagttgcttcatctgcactacgtggataatgatagcccctattacaaggtgcccaaaactctgtcttatacatatgaagagttcaataagtgattgctagtcttgttttaaaacatttaattacctttagtcacaagtgtcttgtcattgctagagagttttccaatctattttcagctagtttgtgaaggctttttttttgatgagctcactataaaatgagagatgaacacatcattggagtcactagattaatctcctgtgtttaatattcacgaccttcagtagaactctctgcaagttcagcaacagcaaacagttattgaggtcctgctctgtgcagagaatcattacacatgctcagataaaatagtagaacagcctgccttttcagaagtataagcaaaataagtcagatttgtaaatgaaagaaatttcattaatctagtatactgactttaaaaactggatattccttagaaatacctagggcatttaaaatatgtacacaccagtgccagggccctactcacagagaatctcattcaatttaagatggaacctaaaattaaatgctttttaaaagctctctgggggattataatgcacaagcagagttgaaaatgattgatttagcgcaaaccctccacttaaaatgttaagacttacagaagcttatttcaggtgacatggttaagttagtgctataactaacactaaatgttgtgccttctgatactggataaatggttgtttaattaccaaataacatctgcatttcactgtacttatttatatatttaatcattcataaaacaaatatttactgagaattttttcaatgctggaaatgggcatacaatgctaagcaacacagagtcacccagtgatttttttcaagattaaaattttctagaggagattggcagtaaaaactaaattaagaaaacaacaatatctataagtatatgactgcagccctgagactgcactaaaggcagagtatcagattcattagaatagtaggagacctgatttaaattaggaagaaaaagaatccttttgggggagtgatttttaatctagagattatatgtaactggattttaggataggctgctaaaaattataccctagaggtaactcttttccccccattcccccacaaaaaagatcaatctcagtaaggcttgcaaaaattttcttaaaagattatctaaatgataatgataataacacaaattgtctcttaaatacttgattaagtgctttgtgtgcattattttatttggtcatcacagtaatcctgttactatagatctcttcttaagagcagctctttctaaaaacctcaaactaaatatgaatagtgaaaaagttcacattttcttcttggcatactgtcttcaccaacacatatatttcagtcattagaatgagatgatgactcactaaatcctcaacttaaataagcatcttgaaaggcatcctattctaacaacctcattttgcagatgacatttgcaaggagctaggcagccctgcacagccagtgagttcagaaacttgcatgatctcaaccactcccttgatggatcttacaatctaagcatagcatctgtgaagcatataaaatagaaggcagagaatagcaggcaaattatgagtgacattattatataaattcaaaatgatgagtgaataccaagtggtaaagatgacagcaaatcatacctctggaaactataaaggcagaagcagggactcagtttaatagctaaccgatgccctcttgagaaccaacacacttgggctgcagaaaggcaagaaggagtccattaacaattagattgaatgttgataaactggaactgattatttagttagtgatatggacaggaggcagggaaatactgggtagaagagggcagttccccagcaaaggccccaccctcaagcctggaaacccatggcactgaatgggaacaggcattcctgtttttgtgcccaaatgctgccttttctaagaccactctggcctgccacacccctatcctgtccccatataaaccccaagctccactggcagagcagcagaacagtgtggcagagaaggagagaagagaaggagtatctcaacatcaagatgagttcagctaaggatgatcagaaaggagatcagtagtaagatggaggaacaccagggaaagatcatcttgccacttcatcccctttccagctccccatccatcccacagagaaccacctccatcattcagtaaaatccccacattcgccatccttcaagtccatgtgacctgattcttcctggatgccatactagacccgggcaccaaaagggcagggtataaaaggctgtcaccctgactctccaccaagctggttaacacttagccatccatggacagcaaagataaaagcacactgtaacacacctagacactgccatggggccagagcccaaaactgctcaccctggctcacctgcatgcttcccctcccacaagaagtttgagtgcatggaggctgaggaaatgagccacacccctgttccaagtcccacagaggtgtcagggaactcttctgcctcactagggctattcaaaatcaacgttttttttcttatcacttttatcaggttcacacatatatggctcattttatttaagtataaaactttctttccaaatcacaggggctatgtctaagacaatctatgtttggcaggtgaaaaaaaatgccctgaattgggaacaaggctagagagaagcaaaaggtgccaatattaacttacataaagataacctagagtcataaaatattacctaagaaaaacatttttgcaagtgtttgggggcacctattccaataactgtatgtgttagtgttttctcacatgtattcaaagctttgcatagcaaaacaatgtctgtaggttttagttaacagattatattgtggtgtgtaaatacaaaactatggaaatatatgtagagggtgaggaaagacttcccaaaagaagtggggtctaaactttgttggcaaaagaatacaggtactttggggtgatgagaagtcaaagaaagagaagaatgtagaggctgaaaagaagttcagacgattgcagatagactagtttggctgttgtgcagtgctagagagatgtaaacgcatgaagatgtatcatggcaagaataaaaagctaaggtagcattggagacctcctaagaattttattaggtggatctcatgatgattattttacttttaaataacattaatttgactgtgttcatgggagaaattaaagagaggaaagattgaacctaaagagacccattgagagactcttgtagttacattatgataaatcacagagacatagaggaaactgctggaatattaaattcaggtgtctgtcatcctctatttatctgagactaagtatgaaagttccagaagatgtccagtgtttttgtatgttcatattcacctggaagagagaatttgctaatgaacagaaagttatatttgatatgggtaaagtatctggtgcaaaacaaattttttcgtaacagcaaatacaactgtaggggacgaccaagattgtcagaaaagtatcgactgacaaaaaaaaatacaatgattaaaaacacatttgctatatattcctctttttgtagctcaatataaaatactggcttgtctggcagtttttgcccaccttaatttataatactgtcctgcgacttctctccaaattatgagatccatgaaatggagccatcattctggcatcctgggatatttgttcaagaaccacaggacactaaggggttcaactataaagcatgtagttcagagcaagtcagctcattttatgcaaggcacaaagatttcctgtagaaggcttcaacatccccaggccactttgtcctgtaagagacccaagctatactttggatagtttaaccaattaaaaagtaaaggagctgcccagaggccagtgttctgcagtcatctctcaagtatgatatgacaaggtctttaaagaatgtgttgtaattcttccctctttggtcttcaatgcaaagtgtctcattttaaaaccctgaggctctatactcaaaactatagagatcaaaaagtttgaaattccctgatattctctgtttaccaatgataaaactttgattacccacattttatctttataaagcacctgaatggtagatcatcatgttattaacaccaagagcatggttttacctgttagggattgcaacggattcaaaagcttccctttgttcatgttctcaatttcttccaagagctttattttatacagggaaataaatatcatattattttttctagaattaggagtacaggggcaaagtaacgtttatcagaaaataagaacatgctgggataagaaatgggaagttaaatgagccaccaactcttggttgccctgtaccgttttcttgatatatctattcaaggccacttgggaaaattttcctactgaaacagtctgtagtagtgcatcctgtacccaaaacgttgctctacttaaagtgagaaggagaaggatgagcagtttttcaaccaaccttacctaaaaacaggtcaggtccaagtagagacttgcaaatataaaaagatgtaaaaattcaattttctattaaataacaaaaatgaaatatccctaaaaaaatccttgaaatgctaaaccaaaatttaggtttgtccaagattatcactgaaactcaagtccagaattcatggattctgtcacacactttgagaatataaatcagtcaagaagggagaagagaagggcaatagtagagacatttcctggagatttctattgacatgctgtgagttctcacttctaaatcccagggagggatttcttccttctttatttcagacttggtgaggggtccctccactgcatgactgggaaagcttaaatactctgctgcaggtgaggagatagagagctggtcctgatcgttactcgagaaaagcaaaggcaaccaggggcaagtgggaggtggatacatttctagaatttggtaagaaaagtatgtgtgttatacatgaaaaagataaagttcacatgggaggaaaagcccttctagggtcatctgtttgggaagtgggaagacacagaaggcccccatgcacaagaagttagagatcaatttcagattcctccctatggaagaaaacatgagtcgtcaccatgaaagaaatacttttgcctgagtcaagaaatgtcaagagaatatccaccaataatggccatctccaatgaacccatgaattttctgctaggaaacaggaagaccacaaagtaagcagtggtttgaagatggtgaaattcaggcatgccctttcccaagcttttaccacttttgatcaataacttgtacttaacatttagccgctgatttttaagacactttgcaatactctattatcttttccagatgacaaattttatctgacagttttcatctagagacagaggaaatttacatatactaaatacatgttaaagaaacagcaagagaaaaaaaaatgaggttacatttttatattgccatgagttttgtttttcagtatcttggttgaggatgtagatttctacatagagacaagttctacaataaagtagaacatttgagctaaatatttcagaaaagtaaaaggaaacatgctccagtgtgattggtagctgcccatagaatacttacaaaacttttacttacaaaatgtcattttttttaaatctggaaagttttctttatttgagagaatgcatagcttccagggatgttcatggagtcctaaggaaggaaagagaaagtcactgcagaagattgcaaaatgtttccaattcaactctcatccttgaattcatgtcccttctgatgtaattttttagtatcctccaactctaaggactcaaccatctgattttctttggtcagtaaaatgagacagaggaatagtatgcaagttctgacccaaagaatcatatgggaaaagctccttgatattggccttagcaataatttttttttggatatcacaacaaaagctcagatgacaaaagctaaaattaacaaacggtaatacatctaactaaaaggtttctgtgtagcaaaaaagagaaagaaaaggcagcctactgattgggagaaaatatttgcacacaatatatctgattaggggttaatattcaaaagataagaaattcacataacccaatagccaaaaatacaaccagtttttaaaatggcaaagaacttgaatagacatttcttcaaataagacagaaaagttgccgatagatatatgaaaaagcactcaacatcactagttatttgggaaatgcaaaccaaaaccagaaaatatcaccccacacttgttagactggctattatcaaaaagaccagagataagtgttagaaagggtagacgtaaagaaaagggaaaacttgtacactattggtaacaatgtaaattggctcagccattatggaatgcagtgtggagattcctcacaaaagtaaaaatagatctactatatgacccagcaatccctgttctgcatatatatgcaaaagaaatgaaattagcacctcatagagatatctgcactcccatgctcattgcagcattattcacagcagccaaaatatggaaacaaccttagtgtcgattggtgaatgaatggataaagaaactgggagatatatagatatatacatgtagatgtgtacatagatacatatataaaattaaatcatatataatgaaatatagtaagtattattcagccttataacagatggcaatcctgccatttatgacaacatggatgagtctggacattatgctaagcaaaaaaactcagattcaaaaagaaaaatattacatgatctcacttatgtgtgaaatctaaatatatataatttatatatatttatatatcacatataaaaattatatatctttgatatgtaatttatatatatttatatatcatatataaaaattatatatatatttcatatatatttatataaaaatcctgttgtataccttaaatatatatcttttaaaaacagagacatctaggaaccttagtgcatacataagtctgtttttcacctttcaacagcagagtgactatcacattaaatatatgatgcctaaaaagcatctctaaaataaaataaatgttggttatctttctcaactcctagcagtattttgttaatgtatctatagatacttacagtaaaaagaagaaattgtacaaatagacatgaaaagaaaagcaatagcccatagattaataagaaaaaaaacagaaggattaaaaagcaagatagaaagaacattaaagtgctcagttttaaatgagatatgtcatgaatttcccaactttaaaaaattgggctgtgcaaagaaaaatttgtgtgtgtacgtggtgtgtgtgtgtacagagaggcagaaggagagacatataatacaataatatgtttataaatttatagatatgtgtgtatatattaaaaaagtaaaataaactattgtattcatacattattaaatgttaattatgtatttatcaatcaactagtgagtatttttagtccatttggactgctataacaaaacgtcataaacagtagcttaaaaaaataaaaattcatttctcacagttctagagactaagaagtccaacttcaaaggtctggcagattcattgtctggtgaaagcccacttccttacagatggtggtttcttactatgccctttcatggtggaaggcataagggacttctctgttctcttttataaggacactaatcccattcataagggctgtactttcatgacctaatcctttgcaaaggccctacctcctaatactatcactttggggttaaggatttcaatatatgaattttgggggaacacatatatttagaccatagcaagttcctactatgtactcaatgttggtacagcaagacatagtcctataccacaagaaggtggcattatataataaaatataaatatgtttataaaaataaatataactcacacatatactgaaaggcaggcaagtgaaccaaatcaaatgctgtgttggctatgaatatttagcatgctccggaagtcaagaaggatttcagatactggagccactggtgaagatgaggcttaaactgagatgttaagggtcagttggttagatgagaaagggctatctattccctgccctgaaggaacagcctgagagaagcaggggaggttcagcagcatgaagcattgcagaaaatccataggtacgaatgtgtggcaggcatgaagcatgggtgagcaggaagagtagagggaagggggagaatgatagcaagaaacctgtgattaaggactttgcatggcaagttaaagactgagcatatttccataaataggaaggagccttaacagtggataaatgtgattttttatgctttgaaaagatcaccttgtcaccatctggaagatggatgggagaggaaccagacaagaggcaagatggcttaggggaaggaagaggcgattctgtgggcataatccaggaaaagcataataagaacttgtccaggacaagaaaaaactaaaatcgaataagtggggctgtaccaaagaaggatagaatcaaggtggtttcagctcattcaatattttaaaaaaattatacacatatttttgtgagtacataactgatgcatgcatacttcatttatccacataaacaagagaggatatacaaaaagtaaaagttctgtgataatgtggaggtagtatgggtttattggtttaattgacagcatttctttttgcacttaaaatataataaagcttatagcttggtttggtaataccaagtgcctcaaaaaaagtctgtatatctaaataagtctataacagatttagtttaatatttaaatccaagagtaatagaattacaagggtaaagtgtgtttccctggaagaattacttgaaggtggatagacatgtagaagaattgagccttgcagggaaatcattgattagaaacaataataatggcatatgccagatcacattgtcggaaatttatttttgattttgcttaggcactagaagtaggagtctacaagaggaatagaggcataagcataaaacttgaaagggcaaatggaaatttccctttgtagtaaggagacagacgtttcttactaaagaaaagataaaaggctgctttgaagcatcctgagaagactttatgcacaaagctcagagaggtctccaagctacagacaaatgctggctctaatactaagaacggtatgttcaatgctagacagaaatgttggagggctattcaaagcaatgatcagtaatggttgaaaattagtaggaaaagttttgattgtgtatagtagttttttatttttcattcttgctcaaaattggatgccatctttttaaaatatagctactacctattttgtgattatcattagatagcacagataaaattaatacataacttttaaatttttcaacttttattttagatatggggatacatgtacaggcttattacatgggaatattgcatgattctgaggtttgaggtacagatcccctcacgcaggtagtaagcatagtacctgatagatactaatatttcaatccatactccccttcttcctgcccccttccccactctagtaatcctcagtgtgtattgttcccacatttatgtccacgtgtgctcaatgtttagctcttatggatatgatttcattcttttttatggctgcatagtattctgcggtgtgtgtgtgtgtgtgtgatatcacattttctttacccagtctaccattgatgggcacctgaaaatgatcaaggacatcatttgagcataagcaggaacatttttgctaaagtctactgttaactagaaagtgtcaaaaaacactttatggatagtaagaacacagaagattcataaagttttaaaacatccctaaaaagtaagcaaggtggcttactatgctccaggcatttgagatatgtcagtgaatcaaacttacaaagacccatgctctcatggagtttatactgtagcaattgcattcattttctatatctgttgtaacaaattactactatcttgaaagcttaaaagcacaaatttattttctcacagttctggaagccagaagtctgaaatcagtataattggtcccaaatcaaggaaatcaaggagtctccaacacctcattccctccagaggatctaggggagaatctgttccttgcgtcttccagcttctggtgtctacaattattccctggcttgtgcccacatcactctagtctctgcctctgtggtcgcattgctcccacttatgtccatcaaatttccatctgcttctctcttacaggaacactcatagctgcatttagagcctatgtagataatataagataatctctccttcctaagatccttaatttaatcacatctgcagagatcatttttccaaacaaggtaacatttcttaggttctgggcattaggacctggtgtcttcaggggcgttattcagcctgccacggcaatggaaacgcgcaattcaccaagtgataaataaataatatagtagtcaggccaagaacagtggttcacgcctgtaatcccagcactttgggaggccaaggcaggcagatcacttgaggtcaggagttcgagactagcctggccaacatggtgaaaccccgtctttactgaaaaatacaaaaattagctgggagtgatggcacacgcctgtagtcccagcttctcgagaggctaaggcaggagaatctcttgagtctgggcagcggaggttgtagggagccgagattgcgccactgcactccaggctgggagacagagagagacaacgtctcaaaaaaaaaagaaaaagatagagaaaattgatatacacttgagcccaggaaagggaggttgcagtgagcccagatcgtgccattgcactccagcctgggcaacagagcgagactctgtctcaaaaaaaagatatggtaattagatggtgataagggacttagggggaaatgtagaagatggtaaagggaccaatgattccaggagttggaggatagagagaggaagaaattaccttttaaagtactttctttggataagcttcattgagcaaaaagaaggagaaaaaggagtagacctcactgatacttgcaggaagagcttccaagcagcagacaggagcagccggagtccagcctttaaggggcagctggcttgcagcattctcgctactaaaagttgtgagaccaaatgagcttttaggatgacagtgaagcagatagaaatggagaaatcaagaggtctaagactgggacagaggcatcttaacattcaaatgtcagagaaaatagagataggagaaaggagaccgagaaagcttggccaaggaaacagggaaaggcaagaaaggatggagacttgtaggtcaaaggaagaaagatgttcaaagagaaatgaataatggactggcaaaggctcgtgataggtcaagtaagttgagaacagagaactgatcttcgttatttagcggaaggcattatagataaagtacacaggatcggatttggcaggcaactgtgggcaaaaagctgactgcaatgagtttgagactcttctgagtcatggatcagcaatcattccactaaaccgttctgcctaagcgtaagataatatctcatttgctgtagagttcataatttgcctctttaggtagttctacagaaaaaaagagctaagtggctcttttctacttaaagtgcatatgtttctctcatgattttccagatgtttgatttattttctgcaagctcgagtatcatcagactagatgctttgctctacaaacacagctgtgtgaatttgaacactgatgagagattcacccttatggaggcattgtcaagggtcacctccttatcctggcctagatggccagtccatagtgaatagaacaatggaagcaaaattatatcgatctctggcagggcaaagtgtgatgaggataatttggaataactccacagaattttaaaaagtactccaatttctttctttctctctttctttctttctttccttctttctttcctaatttcattgtttctttctttgtttctttgacagagtctcgctgtgtcatctaggctggaatgcagtggtgcgatctctgctcactgcaacctccgcctcctaggttcaagcgattctcctgcctcagcctccagagtagcaggaactacaagcgggcgccaccatccctggctaatttttgtatttttagtagagacagggtttcaccatgttggccacgctagtctcgaactcctgacctcaagtgatccatctccctcggcctcccatagtgctgggattacaggcgtgagccaccgctcccggccatactttctcacatagacacaaatgcacagagacaggaacagaggcagaatgggtagccctgcacaggctttgtatcattctccctctggcacagcaatggctattttccactgtagtaacttcctggcttaacacataagatgataaactttatggattgtttaatcctgctttttccataaaagctttcaagcagctttaaaaatatgatgattctggaggaaaatgtgtaaaataatctggaccagataagatgtcaaatgcaaagacagtactaggagtaatatttcaccatggggatgctggtcacaagaaactacataaccattacaggcatctctgaatttttcttcaaatttcctgacatctaccatagaggtgttgtattagcaagctcaagttcccgtaacagaataccacagactaggtggcttaaacaacagaaatttatttccttacatttctggaggctctaagtccaagatcaaggtgccagcaagctaggtttccggcgaggcctctctccctggcttagagatgactactttcttgctgtgtcttcatgtggccttttcactgttactgtctcttcctcttcttataaggccaccaatacttctggactagggccccacttgtggattataaccccatttaacattacttacctctttaaaggccctacctccaaatacagtcatattagggatgagggtttcatcatctgaattggaggtttaggggaggaagatacaattcagttataacacgaggcatgaatttctggggtctcccttttgctaagttacataaaccaggggggatagtaggactggcacctcattgtaaacctttaggaggctaatcaaggttctcatctgaaggaatattgactgcacctttaaatagaactaggatgttttcattaaaagaaaattctggaacatcaaacaaatattcacggtctccagattcttttctattgatccatattcacagacaaagttttgttgttatttttaattaagtagtgtgtatgcttacaaaggaatatatgtaatttatacatgagttctgaagcataataatgaacacaccactcactgtatgagctagaattttaaccataccattgaattagcctgtgtgatctgacctcatccaaatacctctatgtatgcccacaagagatgtgttattttgcagtttcaaataatactgctctaaagggtcttccacatgtctctaagcaccggagtgtttacccagggggagaattgaaggttttcataaagtatgttcagatctagtttcaggaaacaatgctaaattgtgatccaaagcagtagtatcaatttacactcccacctacatgacatagacgttttcattgctttaccttctcaacaactcttagaattatctttttagttttaaatatatatcattgtggtcttcatgtttctgtttattcataagtttgagcatcttttaaaatgtttatttgtcttgcacgttttcacctctgtaaaatacctgttcctgtctttagctcattcttacatgtttttatgtgtcatctatacacatacatatatatgttatatacacatgtttatgtgtcacattagtatatttttcctagatatttgatctaagtcatttatatatgacaccagtaatttctcccaatttataggtatttgtttttactttttttcactgttgtccagcataattggtgggaaaaaatttcaattctagtaaaataaaatgtatcaataatttattttgtgttctaatgccctatgtaattgaaaaaattcaatcttcagtatggagatatcctatattttcttctgacagctttaagtttatgactttcactttaactccaatttgacttgcatttattgtattgcagcatctctcaaccttggcaccataatattttgggctgaataattctttgtttatggggttgtcctggacactttaggatatcatgcagcatcactagcctcaacccactcaatgccagtagcaacccactgccactggtgacaacaacaaatgtgtctaggcattgacaaatgtctcctggatggaaacatttgtcatccagagagagaaaggggaagtctggctctgtcacccaagctggaatgcagtggtgcgatatcagctcactgcagcctcgaccttcccagctccagtgcttctcccacttcaacctaccaagtagctgggactacaggcacatgccaccatgtctggctaatttttttttgctttttgtttgtttgtttgttttgagacggagtcttcctctgtcacccaggctggagtgcagtggcacgatcttgactcactgcaacctccgcctctcaggttcaagtgattctcctccctcagcctcccaaattgctgggattacagttatgcgccaccatgcccagcagcattagatattttaaagtcattaatgccattcaataaaatgtcccacaaaatgatgtatgcctcatttattagatttattccaaattgtcatatttttgctattgtaaataatatatttttaatttttttctactgtgattggcatatagacatgcaatagcttattgtaaatcaaacttatatctagccatcttaatacttactacttcttataacttgtttataggcttatttgtgctatttttataaatacaatcatataaactacactttatgagttttgtctctgcttgtctaatctttacgcttcttatttcttttttgttgttgttttggtattgtcctggttacaatgtacaaaccatcactgaatagaagtggtaatgaagccccaaatttaaaacagaagtttccaactttgccctgtgttttgatcaattttctcaacttggctaggttatagtagtcagtttcttgttcaaacatcagtctagatgttgctgtgaaggtgatattaaatataattaacatctaaatcagaagactttaagtagagcaggttaccctctgtagcctgggcggttctcatccaatcagttgaaggccttaagagaaaagactgaggtcccccaaagaggaaggaattctgctcacaggctgcttcagacacaagactgcaacatcaatgcctgcaagaatttctagcctactttccagctttatacatctcagacttgccagcccacagagctatgtgagtcaattccttaaaatgaaactctctacatgtatctctggctccatatctatatatgctatgagtctatgtgttccgtttctctggaggaaccttaactaatacaccccatgaagaatgaagtttcatgtgggtttttggcagttactctttgtcaagttaagacagtgtgatgggttaaattgtgcctgtccacaatatgttcattgaaaacctcagatgtaattaaagtaagaatctcatcatgagatcatcctggattcacataggatctatataacatgatgagagagataggaaaggagacacagagacacaaggaagaaagccatgtaaaaccagattgaagtgttgctgccacaagccaagaaatactaggggccattagaagcttaaagagggaagaaaagattctcccctaaagctttcagagtgagtgtggtctttctgacaccttgatttcattattctggtcttcagaactgtgaaagaactttctgttgtttcaaaccaacaagtttgcagtaatttgttccagaagttctagaaagctaacacagtttccttctccacctaaaattcagaaaattgctgaattttataaaatgtttctgcatttatcagtattggtagggaaaggaggcagggacattctgggcagaagagggcaggttcccagggagtgccccacccttaagcctggaactgcagcccaaagtgagaacttacatacctgttttcctgcttgaacgttgcattttccaaaaccaccatggcctgccccatcccctatcctgtacctatataaaccccaggttcagccagcagagaggagaagcagcaggatgttagagactgtgattggatgtcagggagaagtggcttgacttcagagggatgacttaatggtgtagctttgcagaggagtccaaccaggggatgggcagacttcaggggaagattaccttccctctctgtccccttttcagtttctcttcctgctgagagccactttcatcagcaataaaatcccctgcatttaccatctttaatttgttcatgtgacctcattcctcctgaacaccagacaagaacttgggtatgggtgcaaaagactgtcacactgacactccactgagctgttaacacttaagccgtctgtagacagcagagctaaaagagcatgagcagttttgctcccaccgacacccaaaagcgctcacctcaagtcctgcacccgctcacctgcattccctttcccacgaggtgtgaagcacagcgggtctgagtgaatggaattcatccctgccagcaccaaaggggcaggctgtttccagcacccctgtactccagttccaacctgcaaagcagccagggaaatatcctgcttcagtatcacgataggcagaaattgtagcaagtattgctaaagaccactggttaaaagcacagaagtacttaaaacaaactgagctatttattcaaaatgcacaaatttatatgctaaactgactgccttagaaaattctacaaaacacattggccttcagaaaaaggatatcatcatatttcatgtaccttctggaaaactaaactacatactcatgagacaatgagagtaaataaagcaaataatgtcctaatattattataagattaattttgacctataaaactagcactctaggagaaacatggggacccccaaagtctcaccccatacttatgaactgctgctacattctgttatagtggtattagggaaaaagttatatgtggaatttcttccaggtatgtcattcaagaacaccaaaactatttataaatacatttggagaaaatgtttccctttaaatttagcatatctgtttctcctgaaaatacccacagggacacagtcttttattttgaatcaacttccaaaagtgctgcatctccttgtcatgcaattgtagtgtcaggtctccacaggtaattatatctgcatcaaaatgcatggaattgatataggaaaccagaacataaccaaacttggctcatggcttgcactttagggtgagttatatgaaaaagagatctttacaggataaagcaaatttctagtttatactatcaagggagcttgagagcagtttatttgaaatttaaaaaaaaatgaaaagaaaagaaaaatggccagcacaattttaataaaattttgctaactttttggctaaaaagagagacttaaagtcttgaatatggcaacatatatttttctggtctcaatcagaaatattatagtaaaaatcataacagaaggtaacatatcatgccctaaagcaggtatgtttttgtgcataaaagaagcagatagttttttttaaattacatataaaactaagtacatttaattatgatgaaatatttttccatgatccaatttaaagtaaaaactgaaatgaggtaaagggaagagtactagaaatgcagtagcatgatacagcaagctgaaaagattcggaaataagcatttgctctgtttctattaacgctgctaggttctctttttatcagccagcagggagctcttcacattttgtgtattcttgaagtattcagtaataataagcatatagttgtcttttagaaaaggtcagctacaaccatagcttttgtcagatcccgtagtagtaaccagccatggtcagaactacagccaatcttatggtctcctaaaccttcacctctatagctacagccggggacataattccagcattaaaggtgtttatacaataggttccatgtatggtaataggatttggaagatttaggatggtctcctaaaccttcacctccgcagctatcgccaggagcataattccagtatctaaaggtgtttatacaataggtgccatacctggtaataggatttggagaatcactgataactattcttaagtcacatgtcaccacctctccaagaatccataccactaatacttatgaaagcatatctcttttattcactctcctaaatctccacaataatctatacaaaagcatttattatcttggcctcttacataacaggattcttttgtgattgtaaaagtgttccctttgagttttctggggagttaggcatttccacaaatcagttttgtgcatttaatgagcagtgaattccacgtcctcaatgtccttgtcttcactgaaatgtattcatgacagtcacaagcaacctgagtgtgctgtggttctctaattatacacctgatctttcagtcaatgcaaatgatgagattgttctcataactaaaaacctcattcacctttttctctagagccaactcatgtcttgaatttatttggaaacaactttgtatttttggtttctactttattttcttttcctggaagacctgtaatttatttatttttttagttgctgtaaaaacacttaacatgaaattaactctcttaacaaatttttaagtgcacaacacagcataggtaaatataggcattatgttgtacagcagatctcagagcttattcttcttgcattactgacactttatacccattgagtagcaatttcccagttctcccttccttcagcccctggcaaccaccattctactttctgctactataagtttgcctattttaaatacctcatgtaagtagaatcatacttattggcttatttcacttagcataatgtcttccaggttcatccatattgttatatatgccaggattttcttcctttttaaggctgaaaaatattccattgtatatatatactacattttctttatttattgatcagccaataaacatttaggtagttttcatatcttggccattttgaataatgctgcaacaaagataggagtgcaaatatctcttaagttcctgatttccattattttaaataggtgcccagaagtgtgatggctgaatcatatggtagctttacattttaattttttgaggaatgttcataccattatccatactggctgcaccatattttacatttccaccaacagtgtacagaggttccaatttctccatgtcctcatcaatggttgtcttttttataatagccatcataataggtatgagatggtatctcattgtggttttgatttgcattcccctgataattagtgatgttgagcatcttttcatgtacctgttggtcatttatatctcttctctggagaaatgcctgttaaggtcttttgcccatttttaattatttgtttgggtttttttaatttagttattaggttgtatatattgtgattgttaatctcttaacatatatatgatttgaaaatattgcctctgactgcataagttacctttcaatgttgttggttatttcccttgctgtgaagaagctctttagtttgatatagtaccacttgtctattatgctttttttgcttatgcttttggtgtcatatccaaggtatcatagccaagaccaatgatgtcatgaagcttttctcctatgttttcttctacatgttttacagtttcaggtcttaggttagtctttaatccattttgagttgattttcatatataatataaattaagggtctgatgttattctttttcatgtagctatccagttcttccaacattgttccttgaagggactgctttccccattgtatattcttgccacaatatgacaactcccaaaagaccaggtatagaaggaatttaccacaatactatgatggtcacgtatgaaaagcccacaactaacatactcaattgtaaaaaaaatggaaaggttttcctctaaggtcaagaacaagtcaaggatgctcattctggccatttatatttaaaatgctacttgaagttctagacagaataattagacaataaaaataaataaaagtcatacacatcggaaaggaagaagtaaaattatcgctacaaacggcatgatcttatgcacagaaaaccctaaagacttcacagaaaagctgttacaagaaaatcaaaaacttcagtaaaggttcaggatacaaaatcaacatacaaaagtcagtcgtgtttatatacactgacaacaaactatctaaaatggaaattaagaaaataatcctatttgtgatagtatcaaaaagaataaaataggaataaatttaagaagatgaaagatttgtgcattgaaagctacaaagcatgtatgaaagaaattagacaaaataaatggaaagatttctgatgtttacgaattggataacaatattattaaaatgtccatattacccaaagtggtctaccaataccaattttaatgcagtacctataaaatcccagtgacagttttcatagagataagaaaaacaattctgaaattaatataaaaccacaaaggacccaaaacacccaaagcaattttgagaaaaaagaacaaagctagaggcatcacaatttctgatttcaaaatatattataaaaatacaataattaaaacagtatgagatggcataacaaagacatataaaccaatgaaacaggccaggtgtggtgctcacgcctgtaatcccagcacttggagggcggaggtgggtggattacctgagaccaggagtttgagaccagtctggccaacatggcaaaaccccgtctttcctaaaatagaaaagttagctaggcatggtggagcatgcctgtagtgtcagttattcaggaagctcaggcaggagaatccctagaacccaagaggtggaggttgcagtgagctaatatcacgccactgcactccagcctgggtgacagagtgagacactgtctcaaaaacaagcaaataaaaaaatgaaataaaagagagaccccaaaaataaacccatgtttatacagacaactgatattggcaattaactttgaataaattctgtataccttgtcctttcacaatttttgatttagcaatttatcaggaattattttaataactgcttcacgtggtagtttttaggagaagaaataaaaaactcattgtaaattataaggcttcatacaaatataagatgttatgactcattataactttccaaagttatcttttattttacattaggttgaagacattaatactcagaaaattcggcttggaaacttagttgaatttggccaaaaaattttttaaatcagctttttaaaaatgaccctgttaaacatttacacaaaaagcaacttttatttttatattagctagtttggctaaatttgaatacttctagtaaattaataaaactaggttcagttatagcttgaagatttttttttcagcgttttgcaaattatcatgttttaatcccttgaaatagtaagcaagtagaatcattgtaacattatgctgggaagctctattttcagagaacataaatttaattgatagcagctcagcttttttccatttaacactatgaacttgttggtaatattttattagaagttagatttctatggctaaaagtgagtttgaaaaatactgctttgtgttatattttatagactccataaaacctgtcatataggccgaacaaggtagctcacacctgtaatcccagaacttcgggaggccgaggcaggtggatcacaaggtcaggagtttgagaccagcctggccaacatagtgaaaccccttctctactaaaaatacagaaattagctgagcatggtgtgcgcctgtaatcccagctattcaggaggctgaggcaagagaatcacttgaacctgggaggcggaagctgcagtgagccgagatggcaccactgcactccagcctaggcaacagcatgagactccatctcaaacaaacaaacaaacaaaccacatgtcatatagtcttacttttagatttatcctttctttaaaaaactacagttattttattaatttatgggggagcatatataaattacttaataaaatttatttttaaagtagttctacattcacaaaaaaactgagcagagcacagagttcctatacatacccttccctcacctatgcacccccattatgaacatccccaccagggtggtacatttgctacaattgatgaacctatattgacacatcatcaccaaaattccataatttacattagggtttattcatggtgttgtacattctatggattttgaaaaatatataatgacatgtagccaccactaaatatacagaatagtttcactgccctaaatctcctctgtgctccatctattcatttctccctcccctcaattcctggcaactaatgagctcttaactgtctttatagttttgccttttccagattgtcatggggttggaatgatacagtatacagccttttcagattggttgctttcactcagtaatttgcatttcagcttctccaggtcttttcaggactggacagctcatttcttttaagttcttgacagctcatttcttttaagtcctggatagtatttcgttgtctaaatgtagaacagtttatttatcaattcacctattgaaggatgaaggacatctggtttgcttccaagctttaacaattatgaataaatctgccataaacattagtgtgcaagtttttgtatggacatatattttcaattcctttatgcaaatgataaagggtgttattactgggttatgtgataagagtatgtttagttttgtaagataccaccaaattgtctttcaaagaaaccacaatttggcattctcaccatctggtaggtgagagttcctgttgctctacatccttgtcaacgtttggcattgtcaatgaccattctagtcggtttttgctaatacctcattatagttttaatttgcaactccctaatgaaatatgatgttgagcatcttttcatatgcctatttgccatctgtacatattcttcaatgaggtgtttgttcaggtcttttgtctacttttgaatctagtcattcatttcttattgttgaattttaagaaagttttgtgtattttggataagagccctttatcagttgtgtcttagcaaatattttctcccattctgtggcttattttctcatttacttgacatccattaactttgaaatcaaatctgcactctgtatttcaaaccttacacaaatatgtgctatggattgttttaataccatctctatttgacttcactaacaaccattttgttcttccttttaaagtcattcaaatctcacattcttactgaggatatcactaagtgaccacgttatatcttctaaacaaaatgcaaaagaaatggaaacagaagacaccaaaggaatatctttcattctgattacctaaactcatgacattgagaatactggcattgaaaaagacctaccgtcctatgacaaaaccaccatgtttccagatactttttaaagtataaatataacattggagatttgtttcatttcattatgctatgcacagtaacaagccatcagttttcatatttaaacttttcctgatcaaggacataatctgtattcagtatgttggctggccacaagacattctttgctagcaagcaaattactttaaaatatttaaaaataataccttaaaggaaaaagcacagaaacttacctccatttaaagtacataaggacaaatgggaggaaaatgtttggttcattattttactgaatcgtggttgaagttatggccataaataaattagaaattatattcataactgtatcttactcaagaccctaggacaattggcgcaattacacataatggcaagcacattgcatttccctcgtgttgttttatgtacagagagggtagttttactatatgcaatgatcttttaatattggaaaaatacttgagagtattggagatcacatttgtaccagtgaaagtggataataagtgctttaaaattaaaaaaaaaaagtaccagtgaaggtcagaatttgaacgtgtatgtaggtggtagaaatcttggcccacaaactcgaatgtgaaaaacacgttttcattatttgaatcagtgtattatgtttctaaactcctgtgccagtacacaaaaatagaatgtatcccttctttgggagagtccaccattttaactgtattcagcctctttaaaaattactctgagtctcatttttttaatctaaaaaaagaagcataaatgacctatgttaagtcacaataaaaattaaacatactagtcagagatatggatagcaatttatacctctgttccccttcattttcactgatgactgattctctgtctcagcattttctaaatttactatgccgaaatattttccatcttaagaacaatttcctctttgccttgtattttcctttaccatatcccttttctttttatttttacaataaatttcattattttttacttcataaataattcatgagcatataatttaaaacaaatagatcattacagaaaaagccaaagaccattttgaaaatgactactaatcaatgtcccctcctcctctgcaaataaagcaaactaatttaccaattggaaaacttactgcaaaacttatttttcttcttctctgcatttaacatataaataactagctttagaaaatacattaggaagtggtatactttaaccccaaatgaaatattatgtacaattctcccattaagttttcctcttaaaatacctttaaaaatctttctagctatgtctctcattaaaaatcaaaacaataaggcattgcatagaattacatagcatgaatatgtcatattaatagtttatacacacttatattgctaaacatgtaggttatttgtaatttttccctgtcagaaacactattacattgtgttacaaatgtgaaattctatgtattagtttgcttccatgctgctgataaagacaccctagactgggtaatttatacaggaaaaagattttaatagacttagagttccgcatgactgaggaggcctcacaatcatggcagaaggcaaggaggagcaagtcacatcttacatggatggctgctggaaaagagagagcttgtgcagagaaactctcccttatagaaccatcagatcttgtcagatttttttcactaccacgagaacagcacaggaaatcctgctcccatgattcaattacctcccactgggtcactcccacaatatgtgggaaatcaagatgtgatttgggtagggacacagccaaaccatatcattccaccactggcccctcctagacctcatgtcctcacatttcaaaaccaatcacaccttctcaacagtccccaaagtcttaactcatttcagcattaactcaaaagtccacagtccaaagtcttatctgagacaaggcttccttccttcccttctgcctatgagcctgtaaaatcaaaagcaggttagttacttcccagatacaatgggggtacaggcattgggtaaatgaagccattccaaatgggagaaattggccaaaacaaaggggttacagggcctgtgcaagtctaaaatccagcagggcagtcaaattttaaagctccaaaatgatctcctttgaaaccatgtctcacatccaggtcacacttatgcaacagataggctctcatggccttggacagctctgcctctgtggctttgcagggtatagcccccatcgccatcctggctgctttcatggaatggcgttgagtacatttccaagcacacaatacaagctgttggtggatgtactattctggggttggggggatggtggccctcttctcgcaggtccactaggtggtgccccagtagggattctgtatggggtctctgaccccacatttccctttcacactggtctagtggaggttcaccatgagggcctcactcccacagcaaacttctgcctgggcattcaagtgtttccatatatcctctgaaatctaggtaaagttccccaaacctcaatttttgacttccatgcacccacaggctcagcaccacatgcaagctgccaaggcttgaaacttgcccctctgaagcaacagcccaagctgtaccttggccccttttagctgtggctggagcagctgagacacagggcaccaagttcctaggctgcacagagcatgggagtcctgggaccagtccatgaaatcattcttttcccctaggcttctgggcctgtgattggaggggctgccacaaaggtctctgacatgtcctggagacattttccccattgtcttggggattaacatttggttcctcattactgatgcaaatttctgcagctggcttgaatatctcttgagaaaatgaaattttcttttctattgcattgtcaggctgcaaatttttcaatcttttatgctctgcttctcttataaaactgaatgcctttaacagcacccaagtcacctcttgaatgctttgctgcttagaaatgtcttctgccagataccctaaatcatctctctcaagttaaaagttctgcaagtctagggcaggggcaaaatgctgccagcctctttgctaaaacatagcaagagtcgcttttgctccatttcccaacaagttcctcatctccatctgagacctcctcaacctggatttcattgtccatatcattatcaacattttggtcaaagccattcaacaggtctctagggagttccaacgttcccacattttcctatcttcttctgagccctccaaactgttccaaccctgcctgttacccagttccaaagtcacttccacgttttcaggtatcttttctgcaggtccccactctactggttccaatttactctattagttcattttcacactgcccataaagacatacctgagactgggtaatttatacaggaaaggggtttaatggacttaccattccacgtggctggggaggcctcacaatcatggcggaaggtgaaatgcatgtcttacattggtgggaagcaagagagagcttgtgcagagaaactcccccttatagaaccatcagatctggtgagacttattcgctatcacaagaacagcacaggaaagacctgcccccatgattcaattacacttcaccggttgcctcccacaacatgtaggaattcaagatgagatttgggtagggacacagccaaaccatatcactctatatatgtctcagagtagtttttagtgttctgtacaacatatatatttttaaaaaaacattttgtgttgtagggcatgtacatttttaaaaatagatactaaaaagaatgttctctgattctcttattatactctaattcacaatgtatgagaatactcattcacccacacttttgcttaatatatgaggaagttttaattttaataaatgcgattggtgaaaatggtttgttaatctcttaatttgcattaccccattattggtgaacttgagcatcattttaatttttctggatacttgaattttcacttctttaaatttctcttcaaatcctttgcttatttgttttttgagttttaattttttattgctgtagaatatacataacataaattctactatcttagccatttttaaatgaacagttcagtgtcattatgtacactcaatttgttgtgtatccatcaccactctccatctctagaccattttcattatcccaaactgaaactctgaacttaataaacactaaattaccaattccctctcccccaggccctggcaactactattttactttctgtttccatgaatttggctattatagataccttatatatgtggaatcatacaatactttgtttacccatttgcatctggcttgtttcacttagcataatatattcaaagcctttgctcattcattattgagttgtcttttcttattatctttatgactatagatattagtaatatattcttgattgataaattccactgctcaaaaaccacctgtagtaaaacaaagttagatctattaatttgcagcatcaacaaagagtatataatgtgtgtgtgtgtgtgtgagtgtgtgtgtgtgtgtgtgttgaggcggtgggaagttatctttgagcatcacaaaagatgggggaaggtcaagtgttatggactgaatatctgtgtcccccaacaaaatttatatgttgatatcccgacccctaatgtgatggtattaggagatgggatctgaagaaagtgatttgattataaaagtggaaccctcatgaatgggattagtgctcttatttaaaaagattccagagaccttcctcactccttctgcaacatgatggtacagcaggaaggcatcatccatgaatgtggcagatggctcctactaaatctgctggtaatgtgaatcttggacttctcagcctctagagctgtgagaaataaatgtctgttttttaataatctacccagcctatgatattttgttatagcagctcaaacagactaagacatcacccgttgaggaagaatatttataaagttttgagggctgatattacatcatcagattgcattggcaagaattggtatgatttgtaaattaggatgttactggaatattcaatggctttctttagaatatataatctctgtaaagtcacttttagacaaatttgtctgtggtcttatcttaaactatttaaatttcattaaaatggtgttaaaacattttgaacttagtctgtaatatacgtataacttaatctggtcatgatgtgtgtgactcaggatatgttttataagttgtgatttatgcttaaattctcagttttccatacagtgtagcttccacagggtcatgtttcactctttagcataataattatttgtttattaaatacaatagaaatattttctcaaagttgctacattaactttattatgtgttttcttttagtcaaattatcttatattttacttttttcttaagacaatctttaattgacctataaattcgtaagatattcttctatgttttcttttttaattaaggtgaaatttacataatataaaattaattatttggagtgtaatttagtgcactgacagtgctgtgcaatcaccacttctatcaagttccaaaatattttcatcaacccaaaaggaaataccacacctactcaagggttgcttctctttcttctcttccacagtttccatattttgttaatgttttctagttgctaaattttatttttagaactttaatctattggggaatatattaggtttggttccgattttttaattgaattgtaattgccacatttattacataccaaatatttcttttactgtaagtccatttctgcatgttctacttcattcacttcattaatctatcaattcatcttccaaaatataattccagtcactatacctttactacatgtcttaatatctggtaatacaaatcttacctttatgttctttttattaatttttttgcaaatgcctttaaatgtcaaggatgacaactttaaaagaagagctaaaaaagactgaaaagctgagcagagctttcagtggtcaccaggcactcaatagaagaaaagtacatttgagaatttgctaaaagagaaattttactaaaaagtcaaagctgtctcacctgatacgcctagaaggctatatcttagggaaagtggttaaatcagaggtagagaaagttttacaaagtgtaaaatccgggttagttaatttcctgattgaactgaggaaatctgtctttatgcaagctgttggaaggtagaactaatcatatcagtaggaaaaatattatacagttcttcaacagttttctaaatatacaatgtttagtactcaaaaaattactatgaatgcaagaaacaagactaagagaaaataacacaatagatcaagacccagaggcaatccagatagcataaacatcagttgtgatatataaaatactagcgattaataggatcaaaaagtagatgaaaagagtaagaattctaccagagaattgaaatttatttttaaaatcaagtgtaaatgttttagttcattttctgtcatttataacagaatacttgaaactgggtaatatataaagaaaagaaatttatttctgacacttatggaggctgagaagtccaaggtcactggtccacttctggtgagatattcttgctggtggggactctcctcagagttccaaggcggcaaagggcatcacaagacagggtgactcaatgggctaggtcagatctcttcctttcttataaagccaccagttccatgccatgataacctattaattcattaacccatcagtccattaattcataagtctatgaatgaattaagccttcatgagggcagagaacaacatttatttatttcataaaacattattattttatcttcaaaataaaaatacagtagaaaggtattaaagctaaaagtttattcttttgaaacactaataaaatgaacaaactttgtactatcaaaggaatagaaaaaaacaaataaattaccactattgctagtaatagatatatgacaatatattctgcagaacataaatgtaataagaaatcattctaggtaaccttataccagtgcatttgaaaatataaagaaatagacatgacttgaaagtaataaaagaggaaatacaacacttaaataattctatatctattacaaaaagtgaatctttaatttaaaacatctcataaggtaatatcaggcctaaagggcttcaatgggctatattctcaatcactcaagggagaaataatgccaacctaatgtaaactaaactagattatagaaaaagaggatagcaatggtcataatagccttgattttacttttcaacctctattttaggttcagaggtataagtgcaggattgttatataggtaaattgcatgtcacaggggttttgtgtacagattctttcaccactcaggtaataagcatagtaccggataggtagtttttttaaatcctcactctcctctctccctccaccctcaattagaccccattgtctattgctcccttctttgtgtctatatatactcaatgtttacttcccatttataagtggaaacatgcactatttggttttctgttcttgtcttagttcacttaggataatgacctccagctccatttatgttgttacaaaggacaagaaagatctcattccttttatggctatgtatcattccatgaagtatatgtaccacattctcctaatccagtctaccactggtgggcatttagattgatctgatgtctttgatattgtgaatagtgctacaatgaacataaacatagatgtgtctttatgatagaataatttatattcctttgggtatatacccaataatgagattgatgggttgaatggtaattctgctttgagttttttgagaaatcgccaaattgcttccgcagtggctgaactaatttacatttccaccagtagtttttaagtgttccctgttctctgcagccttgccagcatctgatactttttgacttttatgtagtagccattctgactgttgtgagatggtatctcactgtagttttgatttgcatttctataatgattagtgatgttgagcatttttcatatgcttgttggctacatgtatgtcttcttttgagaagtatctgtgcatgtcctttgtccactttttaatgggttttttgtttgttttttgtttgttttgcttgttgattagtttaagtttcttatagattatgggtgttagacctttatccgttgattagtttgcaagtatttactcccattctataggttgtctgtttattctgttgatagtttcttttgctgtgcagaagctcttcggtttaactaggtcccatttgtcaatttttgtttttgttgcagttgctatggcatcttcatcatgaaatctttgccacatcagatgtccagaatggtatttcttaggttactttccagggcttttatactttgaggtttacatttaagtatttaatctatcttgagttggtttttgtatatggtgtaaggaaggtgtctagtttcaatctgcatgtgggtggccagttatcccagaaccattcattgaataggcagtcctttccccattacttgtttttgtctacttgttgaagatagatggttataggtgtatggctcatttctgggctctctattctgtttcattggtctatgagtctgtttttataccagtaccatgctgttttggtcactgtagtcttgtagcatagtttgaagtcaggcataatgcctctggctttgttctttttgtttagaattgccttggttccatatgaagtttttaatagtttttttctaattttgtgaagagtatcattggtagtttaataggaatagcattgaatccgtaaatttctctgaacagtatggccatttaaacaacattgaatcttcctatccatgagaatggaatgtttttccatttgcttgtgtcatctctgattactttgagcagtgttttgtaatttttgacatagagcactttcacctccctgattagctgtattcctagaataaccttgatttcaaaaccaaagtcttgacgcaaaggaagattgcagatcaatcttcctcctcaagatacatccaaaatattaagcaacttcttaggaaattatcaaattaactcaaatttgattgtatgtaaaacaatgatatctttttccactcataaattatgtaaaaagtaggcagtgaggtaagtattaggaaagtttagaggaatatcgagatctcatacactgttgttgtgtatatggataacacttctaggtgatgatttgacagtacttactgaaatgaaaatgcatgtaacccatgatgcattaattttatgctagggaacataaaccagaggatttatcacatagatccacaaaaagacattcacaacaatgttcaccgctgtattgtttatggaagaagagattagaagacaatacaagtagccacagctatgatgcatggaatactacagaatatggtgaaatgctatgtaagggctagaaacaattcattaggtgtacatgtatcctgagctaatgttaagctgatttgcgtaggtataattacagcagttatttatgccaatgtctgatttcactaatcaatatccatagcatattaaaaatattaagtatttttactatcacgcttgcatctagccacatgggatggcttttaaaaacatagtctggccaggcgcagtggctcacgcctgtaatcccagcactctgggaggccgaggcgggcggatcacctgaggtccggagttcgagaccagcctgaccaacatggagaaaccccgtctctactaaaaatacaaaattagccaggcgtggtggcatatgcctgtaatcctagctactccggaggctgaggcagaagaatggcttgaatccgggaggtggaggttgctgtgagccgagatcaggccactgcactccagcctgggcaacaagagtgaaactccgtctgaaaaacaaaacaaaacaaaccaccgtagttttaagtagaatacagtcatgtaccacagagcaacattttattcaatgacagatcacctatatgatggtagtcacataagattacaataccatatttttagtataccttttctatatttagacatgtttagatacacaaatacttaccattgtattacagtcacctacaatattcagcacagtaatgtgctgcacaggtttgtggcctaggaatgataaattataccatatagcctgggtatgtagtaggctgtatcatccaggtttgtgagtacaccctaggctgtactcacattctgtgtacaaccacaaaatcacctaacagtgcatttctcagaacatatccctgttgttaagtgacacatgactgtgtcagagtgacagtaaatacactgtttgttttaaaatgaggatcacattcacatcccaaaaaacacaatgtatatttttgaaatattcaagctattccacaattataatacatacaaggaagaaacaaggaggtaatgggatagagattagggataatctgtataataatattataaaataaaacaggagaagatatgttaagggaaatatttttattattatattttttgtttgtttgtttggagacagagtctcactctgtcgcccaggctggagtgtagcggtgcaatctcggctcactgcaacctccgcctcccagatttaagcaatccttctgcctcagccttccaagtagctgggactacaggcatgggccatcacacccagctaatttttgtatttttagtagagacagggtttcaccatgttggccaggctggtctcgaactgctgacctcaagttgtcctctcacctcggcctcccaaagtgctgggattacaggcgtgagctaccgtgcctggctggaaaatatttttatactgagccactaaattaatcctatgtatctgaggtctaaaacacacaagccaacaaattaattcttccatttccatataccttccttcttgtatttcatttttgttttaattacaaaagtaatgcattgcaaacagatattattttaatttttattaagttaatttccccattattctctatttctgctaaccaatgttgacactttagggtttcccttttctatatgtatccaaaacagaattaacacactttgggttttttatttttatttacttaacaagaatggcattatgcaacgatttcaaaaattattaacttgtaaatactttccacataagaagttgtctgtcatctgtttctcttttgttgaccatcctcagtgggacctctgtgaagctgagtcagagtatgaagaaagattgactcgaatagtgaagctatagatggaaaggaaggacttacagaaaagaatagtcactccatttagacaagcactaaagtgacaagagagcagaagcagtgagaagctgtgggaattactaggagatttagataatgacaccttcactttattagggacttgcggcaggctatgaatttaattctctttaatgttttgggggagaaacatagctaaagcttatattttgtcatttatgctgtgttttggctgttttagctgtgatgcttggattgttattttagacactggaatcagggggttcaaaatttataaagtttacatatccctatttcattttctcagttcacaatcttttgctttatgtagacatcattttcatatcaatataaaaagttacaactcattattttctatgcctacctaatattgaaaaatactgatataccatagcatttgccatcactgtattgttgaccaattatattggaaaaaactaaaatggatcaataatatccagtgcttgagaacatttcccaagatcagcacttttataccttgctggtgggaatctgaaatactacaaaactgctggagagaaagctggcaatttctaccctatggaaatcaaagcaccagtcaataatacttacaaggaagtgtatcatcacagtgcttttatgctaaataacgtgataaacatttttctgctgaacaattatagatttgtaagcatcatgttatatttagttgcttcttattctgggcatatataaaacaatgccatatgttttattcctgtgatttataaggtcaaggacgacatctgtttcatttctactgtggaccactaagttccaccattagcacagaaggtggcttaattaatattactcaaaaataatgataatgaagcacacagcaaccctcccttcatctgctagagtccatctccttaactgtgcatgaagggaactaattatgatatttcgtgctttttctgaagtgatgtttaactacagcttagaaggcaaaaatgaatgctacaagagatgttttgtgtgactcaaattttcctcctaatcatccaagttttacaaacccttaactctttgttagaaattttagatcttttgttatatttactatatttcatatatttatataaaataatttagttttaaattttactgatgcacatcttttcatgaattttgaaatttctactcataatttagccttgtggattccaaacatcttcactagcttctgaaattgatgtatgcctttctctccaactttaatgaatcccatttccatgtgagttcattagggctctctttgctttctcattctgctcttctgaggaccctttataaattttttgtccaaatagtttgtgtttttatacagattgtatagttttatctagaaacagcctcccaaacctactgagctgtaggaagcaatgacaaacacgagaaaagaagccttaggccagacaaattctgattctcttatcttctgaatcaaggctttccaaaagataaacaaaagctacctatgagtggataaatatgtaagtagtgctgttatattgaacaactattttctcagatgaaaggggtaaaattttacttacaataaacatttcagccaaagatagtatagttcaacagtaaagccagaattgcttattttgcccattttatccagttactaacatgttcagtgtttcatttaacaaatataaatcatatattaccatactcttcacattgtgtccatgaggcgtgctatcatgctgtaagggaaacaagtatgtgcatgcaagtaaaagagaagggaaatgtattagtccattctcagactgctaataaagacatacccaagactgggtaatttataaaggaaagaggtttaattgactcacagttacagacagctggggaggtctcacaatcgtgtcagaaggtcaatgaggagcaaagtcacgtcttccatgacagcaggcaagagacagcttgcctctaggggaattccatcagatctcatgagtgttattcactatcatgagaacagcatgggaaaaacccaccctcatgattcaactacctccaccaggtttctcctatgacacttgggaattatgagagctacaattcaatagagatttgggtggggacacagccaaactatatcaggaaacgaaggggagaggagaggaagaggaggagaggaaagaggaggggaagggaaaggagaggcaagaaggggacgagaaaagaagaagagaaggaaagaatacaaaaaggttaggtaatataataggcatgttcatgggatactatgaaaccagaaaactaaaaataggtgaaaaataccaataaagataattaaatcctaattcatgagaaggatttcttcaggtaaagaaagtggaggaataaacatctgtaaaaaaaaaaaaagttgccattcagatgtgttctttatccatttactttcttaaaagaatatttgacagaatgcacagctggtgacatggcctcacgtgtggcccacagggtgttgacaggcaataccgtgaaaggtgaacagacagactgagaaggaggaggtcaatgttgtcgctcagcacatgaggagacatgttacacagtctccctgaagaagtgtatagattttctaattaaacaggatttgctcagtgaaaatccgagatcattgactgttagcacctttactttttatagaaccactgctatttgccagtaccccacaacctcccaggcactctgcagtgtctgaggaagggcactgggcaagaaaagttataggaaatgtgtttggtttgttctttctatattgtaccttccctcatcaaaaacagtcacataggagaaaatttagatggagcatatttatttgttaaaatctaagtgtcttgaaaatagagagaataaagggttttaatattgttgagggagcagagtaggaatacaaaagagtaaaaaagaaacagagagaagtttcacctaacgcccttacaaagaaagaagcatgagttctgtccctggagcagcaagaagctatgtaccactccaggacactaaaaagttagcaaggtctcaaagaagatagcagaattatgctaaattcctagcttcagcaaagatttctgcactccatacttggcctacacaacttagccaatggatttcaaaaccacatcatgggctaatgtaatgacaaagtctttcatgaccatcactagcaaaaatttatggattttgatgttacctttgaagtataagcattacatctgatgagatgtaaattataataaatttacagatgaaattttctattagctattttttacactatttttacactattttttacactgtttttttacagatgtttattcctccactttctttacctgaagtggcaatttggttttgcattacgcaatataaaatcaatattagaagttgtgtaaagcctaattcaaacctataaaatgtgtgaggcaaaattttaatgtttatattttattctttttgttggattctcgcagaagttccttgagtttttggtcttagactgcctttacataagtatattttgtgtatacaacaagatactaaagaatgaaactatgaaagccagtaaaacagctacattttttcccagaaagtaagtcaaagtatatacttttgaatactctgtcctttccccaatgtatgttcttgacatttttgtcaaaaatacattgactataaattcttagattacattcatgaatttatttctggtttttcaactttgttccgttgttcaatgtgtctgtttttatgacactaccgtgctgttttagttactatggctttgtagtataatttgaagtcaagtaatgtaaagccttcagctttgttttgtttttttgtttgtttgttgttgttgttgttgctaagaattgctttggctattctggatcttttatggttctatataaattttaggattatgtttctatttctgtgaagaatgtaaattagcatagctactatgggaaaaagtgtggaggtgtctcaaaaaaacaaaaataaaactgccataaattacagcaatcccactgctaggtatatatccaaaagaaaggaagttcatatagccaagagatatctgcactcccatgtttattgcagcactatttataataattaaaatattgaataaaactaagtgtccatcaaaattgatgaatggattgcctaagcctaggagtttgagaccagcctaggcaacacagagagagaccctgtctctccaaaaaaaaaaaaacagtgatgcatgcttgtagttccagccgcttgggaggctgaggcacaggaggatcacttgaacccaggagatcgaggctgcaatgagctgtgatagtcccaatgcactccagcctaggtaactgagaaagacccaatttaaaaaaagaaagaaaaccgaaaaaaaaagataagaaaaagaaaataaataaatcctagcatttgtaataatatggatggaattggaggacattatgatacataaaataagccagacacaaaaatacaaaaagagcatgttctcacccataagtaggagctaaaataattgatctcaagagttcaatgatggctaccagagactgagaacagcgctggagaggaaggataaagaagggttggacaatgagtacaaagatacagttagatagaaggaataagatctagcatttgataggaaaatagggcaattatagttaacaattatttattttatatttcgaaatagctagaagagtgaaatcggaataatctcaacacaaagtaataataaatgtttcaagtgatggatattccaactaccctgatttgatcattacacatagtattcatggatcaaaatatcacatgcaactataaatatgtataactattatgtatccataaaaactgaaaataaataaaaaaacaaagtatggattttactaatggtgggaatcacttcgattatttaaagatacataatgggtacaatgaaagctagagatgtccaggaccccatgcgcttgcatcctcaatcagccctctaaagttctctagagagaatgcagatgagaattttcagggaaatagtttattacaatttatggctctgactccaaacttctgtgtggtcttcttggcatgtgtgaatcataaagattacttgcagttttagcattgcccccatgacatttgagttgtagatacagattccaattttgccagtgcactgtgctgtcttgaatgatcagttccatgtcttatacctgtttgttttcctagtgcttaccataagcattcagttcctgtttgtaacttttcctcgtctctctaccacaaaccaactgttcagctttgggcggaacattcaagtggtcattatctaaattgacttatataaagaacgctttgagggaatgacatttaaggccatctcaaagtttctcttaagtaattcattttattttcgttaataccttttgagatttgaagactactatcacatcttttttaaattacttttctgccaagttctcataagtcagcttgttagatcatttctgacttggagggccttaaatcttatgaaaacgtaataatgatagaattagcatctccatgtggttgtacctcaagcaacagatcctctgtggaagaagatgaccttcaactatgtcagtctggactgaaaaaggatataaggttaattgaatttgtctgtttggttttggttgtttgattttcattcccatatagtatagttaaaagctgaggtctcgttttgttttgagtcaactcttctatcatttgtcccttggagtgactttttactgccctctagctgaagaggaggccataattctctgatgctagagagtgcgggaacatgccatctgtcctaagaagggggcatgagtcgaaagaacaccaaaagtgcagtaagttacagctgactcatacaaagggaaaagaagagaacagggatccacagacataaattttccagggagaaaatttgtggcctggaatatatatccctgtgtttcctatgtggtgttccctttgataaaccatctaactagaaaggacattttagaaaaagagagttaggcactctgttctttgaaataaaaagtcagtgaaggagaggaaagtgaagataatggtgaatacaaatttctgattctatttaccattttcctttctactttgcctccaccacagtaatgtttttcctattatcttattaaaagaacattcataaccaagtcatcacagttgattgtaataatgtatgaattaactgtgtaatttatattaatatatgatgacctaaaccatttaggttttgcatcactttgcgttacttagattcttggtacacaattggaaaaatatgtgtggaattttaacagacaatggtgggcgtgggatgggctttaactatgtattttcttaccttagctgatatttacttctattcccatttgaaaatactgtttcctccttgaaaagtgcaatgtatatgattcaccagcaagaaaagcagatactttttattgcagcattttcattgctgtataactgaagttacactatggataacacagcaaccagcaaatttgtttccatttataaactgttaacattacattttctatttaaaattgaagtttgtattattgttgtttgatttcacaggaaaatttgatattctaattgatagatgataattctatacatcaaattcttattttacatattcgtagtttctagtgaatacaaatatcaaggaaaaatgatgtaagacaacatagccttaagttgattttatcgacaatggagtgcaatcaccttgtctacttttggtcgttgctgttgttgagagtgaagattatttgtaatgatttagagtttaaaaggaccatatttctgatcttgcattggtaaataatctcaaatggtaatgaaatgtttctttcttttttttttttttttttttgagacggagtcatgctctgtcgcccaggctggaatgcaatggtgtgatctcggcttactgcaagctccacctcctgggttcaagcgattatcctgcctcagcctccccagtagccgggactacaggcaccaccaccatgcccagctaatttttgtatttttagtagagactgggtttcatcatgttggccaggctggtcttgaactcctgaccttgtgatccatccgccttgacctcccaaagtgctgggattacaggcgtgaaccaccatgcctggcctcgtttttgtataatccattttctcagaggcatttcaccattttgttgggctttaatttgaaaacactattgcaaaatactcaaaaaatacagtaattattttaaaaaatcactcaagcaatgtaacggtatactccagtatgtcacactctgctttgcagtcaagattctaaagttattactttttctatgatgaagttctcaaatagagttcagtagaggttagaggactacatgaagcctatgagtgaagatgatacagcacatatgtagtgtgagatgatgttatcctttttgttcttaagtaaaatgaatatacatattattttgatatatattattttttaaataagaaaaccaaaataactccaagtaatttctaactactaaaatttaaaatctcacacatgcttctaagtatctgtatatttagaactaagtaaaaacaggccaggtgtggtggctcacacctgtaattccagcactttgggaggcagaggcaggcagatcactaaaagtcaggagttcgagaccaccctggccaaacatggggaaactgtctctaacaaaaatacaaaaattagcctggcatggtggcaggtgcctgtaatcccagctactcaggaggctgaggcaggagaattgcttgaacccgagaggcagaggttgcagtgagcggagatcacaccactgcactccagcctgggtgacagagcaagactctgtctcagaaagagaaaaaaaaaaaaaaaaaaagtaagagctaaataaaaacagggaaatccttagagttcggttgctctagtaatttttatgtactccatgaattccaacaaaagcatgagaccaaaaaaaaaaaaaaaaaaggaaagaataataaaatcagatgacttaatttggaggctgctacctctcaaaagttagcatagatgaagcattacattgtttgctgcaaaacaacatacataaggagtcatttgccaacaaaaacaaaatcctattattacgtatcatgctacatgctaagtatactatctcattaactatggcaacagtcctctgacatcagtgtttataacctttttgtttgaatggaagaggagacttatgaaatatgaagattaagaagttttctgacacatgcacagctaggaatgggaacattggcatctaatgtcactctctgttgccccaaagcctgtgctttttaagaaagagaaatgttgtgactacactttgccatagaggagaattgtttgatatccccatataaatagtcctagactcactttatcatacatagcagtctcatagagcaattccttcgccaccacaggaatggagtcaggaattttttttttttttagatgagtctcactctgtcaccgggctttcttaaataattttataattatgtaacaaatataactgaagaaaaaaacaactgatttttgactttgattttgagagagagaaagatatgaggagaagtagaaggaggaggagaagggagaagaggaggaagaggagaagtagatgcaaggtgatgaacagggaaatagtgtaagaatgtcatttctatttcaagtggaatgttaggcaaagtctcctaaggagttcatattaaccagaatcccaaaaaaagtgacagaactgtctatgagaatgtttgagaaaaggccgacggaattagaattagaatcattgtgttcgtgtgtgtgtgtgtgtgtgtgtgtgtgtagccaaggcgggtggattataaggtcaggagttcgagaccagcctggccaacatggtgaaaccccgtctctactaaaaatacaaaaattagccaggcgcggtggcgggtgcctcaatcccagctacttgggaggctgaagcaggagaatcacttgaacctgggaggcggaggttgcagtgagccaagatcgcgccactgcactccagcctgggtgacagagcgagactccatctcgaaaaaaaaaaaaaatgtttcagtgattctctctcctcctcccttttctttggctgataataatctactattctacactaaggatgatatcattccacttcctttcttcattttgtatatttagaagtatatctaattaacaggtacatatttatttaatattaaatatgtggtggatactgacaattaaataactcaagttttatgtagagtagaaaagataaagagaaaaagagttattgaaagttaagaagaaatttctaagaagctaaggatcaactaatctacatagtggtctggctttcaagggggtaaaacatgccccaaattggtgttgactcacacacgcacacaaagagcattttatatttttcaaaatttcaaaatagtcatattttccatctctcagtgaaaccacattatgtctatgactaacaggtactttgaagacaaatggagttttcaccagatgagtcatttttctctaacggagaactatcaggattgaaggtgattaaagcagaacagatctttgagaaactaaataagaaacaatgctcaatggcatttcttagaagcaaaaaatatcagatcatctataacagaatatttattttcataacaaccataataaccgttacagccacagtgggtgctgtgtatacagccatacccacaaccatagcaagagccaaatccacagctcccacacacacttttgtaattgaaatacatagtgtcaggagatgagaattcagccaggtaacagcatttctggagtttggaacccttgggatctttctatataataagaggtctgcaaagtgtgtgccatccctactttgccttctcattcccacaagaatttatatttaacaagcttgttgttgttttattctgtgtcctaagaaagcctctcattttagaccttcatttaattcctgcaagttaatcatagactgtaaaaagtaatttgtacactctgtatacatgttctcagtgagccccaaatgtacactccacaaatatcatgatgctaaatcttgcagggaagtacttccctcagctctaacccaaaacattgagaatccccatccccagcctcctagagaaaggaaggggcttagtgattcctaccttttcaggtgccaccagtattaccatccaatccacaactgtactactcaggagaggataggcataggaaggctaaattgagaaacatgcgttcaattctataatattagaatttattgagaactttcctaaaaaacagaacatgacagtaggcactgctgaaaataacataaaaataaaaatgaaaaacataaataagaccaagaacagaccttcaatgaactcccagcttagtaaggaagagaaacatttacacaaaaaaagtctcagattgatgcggttagagaaaaaggaaagagaaatcctatgaaatagacctcaaaacaatccagaccaggtccacttagggccttcatccatgctgggctttcacctgcagtttttacaatttaacacccatatctatgactcattccctcattgccatcagagtgtgttcaaatgtcactcaaggaggccctccctgaacagtattatttatagctagcaccctcccacagatatatctttattctctacttagcatttatcaagccatttatcaccatatgatagacttgcattttactaattttgttgactgtttttctcactggaatataggatatctgtgaaggcaggaatttctttttttctttagggaataaaatagattttaaaaaagtataataaactggggccaaataataaagagctttgaatattaaggtaaaaagtgtggaattcattctaaaggtaatggagaaccagagaagattttgagcaaattaatggcataatcagctcaatattttgagatacagaaatcacaaccatttatccagtgtacttagtaatgtcctatttcttcgaaaccattatttgctaaattattctcttgagcaaagatctttccttgagcactagccatggttgcattgaatttgtggcattttattttccaattatgtttccaggaacactaggactgggaggtattaaaatgtattccaagaaatagagtttccaagattttaaaatgtgctatcaaacactataaaataaaaacaccttcagagtattcacaatttacatatgcgctgtaagttttacttgcacctaaatgccaggtattgtagtaggagtacaaactggaacgccatgatagcattttaattatccttaggaggacaactgtgtaaagaaaaccagcttgacattcttcaataaactaacatatttgtgtaacaaaataactttttaagttgagaaataacttttaagttcttttgaaagttatcgtcttagagtatatgttcaaatatgaaaatcttatgagtgttcaagtttccaaatcactaaagagactgttggcgtttttatacagcacaagcaaataggccacattaagtcaaacaggtcatcttttttttttttttttttttttttttgagacggagtctcgctctgtcgcccaggccggactgcggactgcagtggcgcaatctcggctcactgcaagctccgcttcccgggttcacgccattctcctgcctcagcctccccagtagctgggactacaggcgcctgccaccgcgcccggctaattttttgtatttttagtagagacggggtttcaccttgttagccaggatggtctcgaaggtcatcttttaaaataaccattgggtaagcagttttgcctagattaaactgaatattttgaaaataaacctttgatgggactcaattacaaaattagtctcaactcaacctaaatatggtattttcttgcccatgagagttgaaaatctatatttaagatgctcagtgaggattgaatcttagacaatctgaaaaaagcttctaaaatttggtacctgagcacagtggctcacacctgtaacttcaccactttgggaggctaaggcaggaggattacttaagggcatgagttccagactagcctgggcaacataatgagaccctgtctctacaaaataaaataaaataaattagcagaatgtggtggcacatgcctatagtcccagctactcaggaggctgaggtgggaggatcccttaagcccaggaatttgaggctgcagtgacctatgatcagaccactgcactctagcctgggtgacagagtgagatcatctttctaaaaaaaatgtttttaattgatactttatttgaaccatcttttgctgcaaattatccgtattatgatgtatcatgtgtttctttgcatatatgtctcatgttacctattttaatatatgcagtctctttaaaagtgagaaccttgttattatttttattttttgttttatattttgctctgtacattctatacccctgcaagcatcttactttgtacagggaaattagaactgcaatatgtattttattgtggatttttttttctatcatttcatacacttaagtatctgttccttttcagacttttgactttcatgtgactgtaaggaattgtggttgctatttttctcttgacccaaaaatgctgagttgctctgaaaagtatttcctaaccatataagaattcattcgtattctgaaaatttgtttctgcttaatttcccgattattgatgacatattatgtaattattttcagcttttcattagtaaaaattcaccacattaagtcaaatgcaaaatttattgcaaatttattcatctttcccatattttccctttcattttctcagctaaggtctcatgttaatagcagtgatgaccctgtgccactttaagtaaaattcggaatttgtatacccctagccttcatttgtaaagtatacaactatgtctttgaccataatagccctctctgtaaaatcaccaataaatttccaaaatatgtgatggtaaaattaagtttcatattcttcccccagctattttctacttcttaccaaatatactactgaccttttaggcccatttttctttcttgaatcaatggtgttatttctctacctggaacatcatcaaatctgaaaatttccattcccacctctgaaagtggcttaactcctatgttctccatcctcatgaagatttctctacgtcaggggaaagaaaatgtgaatgttcacattcatttgcctgcaaatttttttaaatagaaagaagaaaataagcaatttattattctactagatattttataattcactttgttagatttaatttatctcattctccaaaatattcatgtaaaaattaaatacggtgataatattaatagaaatacctttagttcaaagtcagcatccatttaatgttcacatttaaatgcatatataatttataagagtagattatatgcaaaaaatatttaatcattatagatttatgtaaaaatatatgtttaattttgaaaaaaagattgtattgaaaataagtcatatttctgttgtgttttcccttcagtctcagaagatgaggtatttttttcttccttcaaattattagctctccaccaacgtggtatcctaacttgtttctacttttattgctctatggctctatcttcatcagtctcttcaaatctactcccttcttctgcctactcttccctaagagatttttaatgttttcttttgccaatgccagtcacatttcttctccatggttatcgttgacctctgctgccacaaggtatcatttcctctacttccaacccttttcaacaccatcctcattctctttttacaactgtacctttcatgtgttttcttcatttattcctctgactctacccaaactctaactaaggagcccttcctagattcaattccttgactttctctctctaaattctcttattaatttcccatttgtactcccactacaatgtctgacttacagaaagtgatccattaaaacttaaggaataaatgtgtgtgagtaaatattttctctcacatttacagctttaaataaaaaattaatatcagttactttcaaattgatatgtcgtgtactctccttaaatatacaaatcttagctagataatttttttgaatgtattattacctcaaatcaacatatccaaaaccagatacatctctctggcaaaactaaattttaaaaatatttctccctgttaataacatttcctttcttgatgaatacccacattcaaaagtaccacatttatgcatttgtttatgtcactgaaacaaatcattttccatacaaaattttggtatctattttcttactcttactgcaacaggcttaattctggtcctaatcttctcactcttggacccccccaccccaataagtccttagctccaggaactcaatgcatctttcgtttccacactgtccaacctattctgcacattgtttctaaatttatatttcctacatattacttttatcatgcatttcttctgcttaatattctgaatctcctactgtgctaattctatatcctctgcctgggctcacagatctctcataatatacctcttcccctaaccattccaaatctgtttaccactctaagtcatggtaatcatcacattatttgttaaatacattcatgtgcaagacaccaaccatttcccctaaacagccgatttaatgcccattctgcctctgtccccagtgactctcccaccttgaatttctgattttctaatctattaatgcagttcttccaagcccagttcatttccccttcgacagaagctttctgcagttcccggagtcctcattatcttcctttcctatgaactcctgccagtcttttcatctgtgacacataagctgttatatctcaagttttgttcttttctacaaataggtatgttagtcttgatcttccaaatggatggttagttctttgatctcagcaactattctcatctacacaacactatcatggtgctgaccaaacacatattaagtgctcgataaatccctgttgatcacctactgaacccaggtgaaaaaatatattttccattaattcatttgctccactgcaatttttaagagttagagtttctaaaagtggagtgtatggatcagcagttatcagcatcacttgggaatttgttaaaattgcagattttgaggttctacccaaaacctactaaatcagaaggtctaggagtaggacccaaaaactctatgtttttcaagcactctggttaatttaatacacactatcatttcagaaccactgccatagatcaatcgtcttgtcctcataacaaggtctctagataaaatagcagtggccaacacaaaaggttaatggcttactgagcttttatttttgaggacattctgacctgtttaaaaccagacaagtggtgattagcagtgtactttctgtgattcacaaagcttagacaataatggaaacaggctatttgagcaatcagttatctaaatgaatctaaaaggttttgctgtgaaggttaatattccatgttttatctaacatttgccttgtaccctccgccaaaattggtttaatgtgcagttctgaaactggaatctaaagtgcagaggttattgtggaaagctcaatcatctagctgctacataagtctgaatatttgtaaaggttttagaacccaaatgttagattttaagtttatcatccaccatcttttatgcatatcttaccagctctgaataggggtgagataaggaacagagatcacagactcgagctgaggaccctagagagactatctcatgctcaggtttaagagaaattcaggggactcaatgttgatctgtattctgttcaggggacaaagttacccaaagggaagccataaaccccagggccttagcagttaatctcacttccacctagttcaatggtgtgttacggtcctcccaagaaaaaataacagtaggatgtgtgtgtctacatgtaagtatgtgtatacacatacctacaggatgcatgaaggaaatacatacatacacacacacacacacacacacacagagagagagagagaaggaagaggtggaagagtgagggagagagaggcaaagaggaatgagagagagaggagagaaagggaaagagagggaggagagagaaaaaagagggagagtgagggggagagagaaagaggagagtagagagggagagaaaagagagagaaaagtggggagggagaaaaggaggaggagtagagaggagagaggccagaagggagataagcggggagagagagaagagagagaagcaaggagagggagagaaattgggggacaataaagagagagagagagaaagggagggagggatacagagagacagagcgagagaagaggcagattttaaagcattggctcacatgattgtaggggctagcaaaatcaaaatctgctgagcaggctggagacccagggaagagctgatcttgcaacttgaatgtgaactcaggttgaaggcagatttccctcttcctctggtagacatcacccttttctcttaaggccctcaactgcctggaggaagctcacccacattatggaaggtacgtgacttttctcaagtctgctgattaaatgccaaccttatctgaaaaatatcatcatagcaacctttagactggtgttcgaccaaacatttggtctttgtagcttagccaagttgacgcataaaatcagtcatcaaccgtaagtcagaagctgaactgcctgaatcctcagtcattgttataatttgcattctccacacaaatttaactacagagatacttttgaactttaatctcaatcaaatggaaagtacacatttccaggtggaagaaaagaaagatggtttggcaatttggggaaaattctcacttctgtggtctggggcacaattcttagccaactttgaggtgatagggatatcttctcaatcatggatgtgcattgtatttcgtgggaaaactttaataaaatgccagtactcccatctcagaccaataaaaccaaaatctcaaaggtgggactcaggtattgccatttaatggaatctgacatgcattcggatttgagtcactgctctaaataaaggaaagcttcaaataaatctgaaagtgcaatatctgagaaaagcaatgaatctgaaatcaaatcagtctgaaagcacaatatctgagaaaagcaatgagtaggtacaaggggattgaaaggcatggggagtggatgctgcaaggctgagaaacttacaggtaaaaaccatctccaacaatggcgtggctgcattggaggctttcctttcagcttctctgatctgttttctctattccttatcttttcttttccatcttctcttccttttaagttttaggaatggcaatgacattgaattagggttgatggtggagttttacctttgttctctaactacttctaagttttggaagaaacaggaggacccatgtttcttccaaaacttagaggtagaattggaaaacgggtgaatgttttcttccagaacttagaggtgaatgtgggaaacagatgaatgctggattacgaagtcccagtgagggagtgggcttcaggaggtgaaggtgtacttcactgggatagcacacatgaaagggtattgaagatttggcaaggcttgcttttttgtgaaacatggctggataggacttcaacttcacagagttgtaggctattcaaaaatagtccaggaaccagcagcattaggatcactgtaaacttgttagaaaggcaaattctcaagccccacccagaaaaactgaatcagcatctctggaatcagcatgtctgaggcccagaaatctgtttcagcacagtctccagtgattcttatgcatgctgaaactggagaaccatagctataaaataaatgagtgaagagtctgctgtcttgacttcatcctgtttccagtctattcactacgagattttattggtatttattttggtgtatttatttataaccaatacccttgagaaatttattatttatttttaatatttttagctgttcttttaggttttctgagtcaatagccaactcacctagtcttacattagctgcatgcattatttcatcttattaccttattaatttttttaaatggtgatggtggacaccattatcttactcatttgtgggaatttttaggatttcaaccataaacttgatgttaaaatttgtcttgtaaaagataaatattcctcacaaattttactaatcactttttttttttactgtgaatggacgccgaatttcatttaaaaagaacggaaatcataacaaacagtctctcagaccacagtgtaatcaaattagaactcaggattaagaaactcactcaaaactgcacaactacatggaaactgaacaacgtgctcctgaatgactgctgggtaaataatgaaattaaggcagaaataaataatttctttgaaaccaatgagaacaaagacacaatgtaccagaatctctgggctacagcttaatcagtgtttagaggaaaattattagcactaaatacccacaaaagaaagtgggaaagatctaaaatcgacaccctaacatcacaattacaagaactagagcagcaagagcaaataaattcaaaagctagcagaagacaagaaataactaaaatcagagcagaactgaaggagatagagacacgaaaaacccttcaaaaaaatcaatgaatccaggaggtagttttttgaaaagatgaataaaatagatagcacgctagccagactgataaagaagaaaagagagaagaagcatcaaatagacacaataaaaaatgataaaggggatatcaccacagatcccacagaaatacaaaccaccaccagagaatattataaacatctctacacacaaaaaactagaaagtctagaagaaatggataaattcctggacacacacaccctcccaagattaaaccaggaacaagttgaatccctgaatagaccaataacaagttctgaaattgaggcagtaattgatagcctactaacgaaaaagaagcccagaaccagacggattaacagctgaattctgccagaggtacaaagaggacctggtaccattccttctaaaattaatcctaactatagaaaaagagggactcctccctaactcatttatgaggccagaatcatcctgataccaaaacctggcagagatacaacaaaaaaagaaaacttcaggccaatatccctcatgaagattgatgcaaaaatcctcaataaaatactggcaaaccaaatccagcgacacatcaaaaagcttatcctccacgatcaagtcagcttcatccctcagatgcaaggctggttcaacatacgcaaatcaataaacgtaatccttcacataaacagaaccaatgacaaaaaccacatgattatctcaatagatacagaaaaagccttggataaaattcaacacacttcatgctaaaagcactcaataaactaggtattgatggaatgtatctcaaaataataagagctctttatgacaaaccagcagccgatatcatactgaatgggcaaaagctggaagcattccctttgaaaactggcaaaagacaagaatgccctctctcaccactcctattcaacatagtgttggaagttctgcccggggcaatcaggcaagagaaaaaaataaagagtatccaaataggaagagaagaagtcaaattgtgtctgtctggagatgacgtgattgtacatttggaaaactgcatcgtctcagcccaaaaactctttaaagtgataaggaacttcagcaaagtctcaggatacaaaaatcaatgtgcaaaaatcacaagcatttctatacaccaataatagacagagagccaaatcatagtaaactcccattcacaattgctacaaagagaataaaatacctaggaatacaacttaaaagggatgtgaaggacctcttcaaacagaactacaaaccactgctcaaggaaatcagagaggacacaaacaaacggaaaaaccttccaggctcatggataggaagaatcagtatcgtgaaaatggccatactgcccaaagtaatttatagattcaatgctacccccatcaagctaccattgactttcttcacagaattagaaaaaactactttaaatttcatatggaaccaaaaaagagagtatatagccaggacaatcctcagcaaaaagaacaaagatggaggcatcacactacgtgacttcaaagtacaccacaaggctacagtaaacaacacagcatggtactggtaccaaaacagatacatagaccaatggaacagaacagaggcctcagaaatgatgccacacgtttacaaccatctgatctttgacaaacctgacaaaaacaagcaacggggaaaggattccctatttaattaatggtgttaggaaaacaggctagccatatgcagaaaactgaaactggaccccttccttacaccttacacaaaaattaactcaagacggattaaagacttaaacataagacctaaaaccataaaaaccctagaaaaaaatctaggccataccattcaggacacaggcatgggcaaagacttcatgactaaaacatcaaaagcaatggcgacaaaagccaaaattgacaaatgggatctaattaaattaaagaacttctgcatagcaaaagaaactgtcatcagagttaacaggcatcctacagaatgggagaaagttttttcaatctacccatctgacaaagagctaatatccagaatatacaaggagcttaaacaaatttacaagaaaaaaaaaacatcaaaaagtgggtgaaggatataaaaagacacttttcaaaagaagacatttatgctgccaacaaacatatgaaaaatagctcatcatcactggtcattagagaaatgcaaatcaaaaccacagtgagataccacctcatgccagttagaacggcaatcattaaaaaatcaggaaacaacagatgctggagagaatgtggggaaataggaacgcttttacaccgttggtgggagtgtaaattagttcaaccattgtggaagatagtgtggcaattcctcaaggatctagaactagaaataccatttgatccagcaatcccattactgggtatatacccaaaggattataaatcattctactataaagacacatgcgcaagtatgtgtattacagcactattcacaatagcaaagacttgaaaccaactcaaatgcccatcaatgatagactggataaagaaaatgtgtcacatatacaccatggaatactatgcagccataaaaaagaatgagttcatgtcctttgcaggaacatggatgaagctggaaaccatcattctcagcaaactaacacaggacagaaaaacacaccacatgttctgactcacaagtgggagctgaacaatgagaacacatggacgcagggaggggaacgtcacataccagggcctgtcggggcttggggactaggggaggaatagcattaggagaaatacctattgtacatgataggttgatgggtgcagctaacaaccatggcacatgtatacctatgcaacaaacattcacgttctgcacatgtatcccagaaattaaagtataaaaaaaattagttttaactaacatccaaaatggattaacagttcatcaattaaaaaagtctttgcaacatgaatgaatacttttcatcttctttaaactaatcatgtgaattcacaatatgcactctcccagcagttttagaatgagcactacttagtgaagggtcttttgaaatataattgtaactatatgtaaaatacaactgttttctataacattttacctttttgcctatataatcaaaatgaaagtattatttatgtgctcagtttcacaagtttggaagctttcctaccttttcctgtgatctatagattactcaaactcttcagaattgtctcttccttgaagtctttgaagctatctggatagcttttaggggtaggtgtagaacaatttcctcaagaatttcatagatactaaactacatatatttcctatctattttagcaacattcagcaatttaggtcttcctggagaaaatacatttttctagattttaacatttttaacataaatcaatagaaagtattacccaatagctttgacttctgtgtcagctggctttgtcttcttatttatccctaatttgtgtgcttgcctgtttttttccttctttgaaaaaccacttagatatttatcaccaaggtacaaaaagctcttggatttattatactttatactgcttttcagttttctattcattaattttagctaaaattattttctcctgctttttttgtctattttttctttatataaattttcaaattcagtagctttttgttccatttttacatttatataataagaatgtaataaaggcgcttaattctataactttcctgtaaatacagctttggcaatataccagaggtttttatatgcagtctccttgcttattaaattttaatttattttcttctttgactacaaaattgtttattctcacattttttaacactatttttcttctgttatttatttctagctttctaatattgttcccagtgtctataacctacactaattctatcttttggaatatattgatgttcaattaaaaaaaaaaaccttacaagtgcttaaaagaaggtgattttctgtagtgcatggagtttattacatagttttgaaatctttttaatttcccattcatttatctgtgttcaatgtaatcttttaaggactaaaggaggcaattagtttcacactagtactgattttctgccaatatctctagatacaacatttactttggttttgactttatagatttcaatactatgtcacttgttgagttacatttcagtaaaatataagcctcctttgtaattgtttaaacatgttacatttatttaaagtttcatattaaatttgcaaacatttttatatttgttccatttgataactaatcttcacatttaatttttaacttctgatttatttttacatgtgagtctcatagaaattatgtaatagtatttgtagtttgcttttgtatttactcaatttatgtatttatttgaaaagctaaatttgtcatgtatatttgtatcttacttctgtctcttaatataacattttgttttacatccttcctttttgtgtcctttattttctctattttgttttatagtctgggtttcttctatttccgacatccccaaattacctttatttttattgttatattcactgaacattttcctagttttctaattatttttactcttagcacttaatttatttctttaggttttagacatatgttaattatctatactaaactgtatgtttaaatggttttaatacttaacattaccccttggaaccaaaactctcctatttatcaattatttgttcctattcaaccttcagttgagtagtgtatatcttcaagtagttttggggtttttttaattgttttaccttgctttgtttttccattttccaagttacattagtaatccttcctggaggtttgcatatttgaaaataatttaatgttatctcaatctatgaacaatattggggtaaggttaaaattcttgatgtagcaactcttttcctcaagatattgtagttgatattctatttccttctgatttcctagctatggaagaaaaggacagaattgttactgttctctttagatggctctccctagtcccatgtaggtttcggtttattcatgaagttcaataatcctggtaagttatgttttgttgtttctgcttttcatttatcttgatgaacattgacaactcttgttatcagtagatttaattttttcaatttaataaaattttcacctactgtaccatttaatgtttttgtttcttttttttttcaattgttttcattgaagatacctgttatgcttgttttggagtgccgtcatcttctggacaacatctaattggatgctaccaccttctggtcactttgttcaccatgactatttgttggattcaatattatatttttcatgtctatcctctatcactgatacatttttattcatattattttctttctttcttcactttaaaatcttttctgatattatttcttccctcactttattttctaattctaccaataccttttcttatctcaatatagtgacttatttaatttggtattgagttgatcttcttaatttttttttggtattaagcaatacattctaaatttttcttctggttcctagtgtaaatcattttcagaaatattgttctgtgtatgtttttagtaatatattaatcttctttgttgttgcaaaacatttacaacagtcccatgctgtggtgtgttttttattctttttgggaaagttcattcaaggttactatctttcattaagtcttttttgttaatctgggaaatacccgaatccattccatctccatatctggattaaaacctgcaatttcaccaccatcttattctgaattttttccttttcctttccttcggtgctttgaaatagctccaactatgccaaagatattttaaaaataaatgacttacttcacaaaaatacagatatctatatatttgtggaaaaggctgattggcttaggtaaaattgttactaattatgcaatttgtactaaatggaatttaaaaatcaatggtaaaacccaggaaacttgtaaaagaccttagatttagaaatatttgcttgaggcaattcgctaggcttctgagggcgaatatttcaaatcatgttattgctactgcagtctctcttcatcaccatactaaaggtgtctataagccattatttcttatcacaaaagctgccaatataaaaatcaaagcacaacaaatagcaaaacacactgtgtctcctgctgtaaaacctgctgtggatgcagatgtgtgtccactttgaagtgtcaagaactaaccagaaattttgaaatgtttgtgaatagatgcttaattttacctaaaaccaaataagcaatactgtagttgattcgcttataaaaggtaacctattattggcttacaaccaataaatgattatgttataaaaggtaatcattcattggattacaaccaataaatgttctaagatatacaaaaagcagacttcctatcacaaaggaaactttattagaaatctcattctaagctcctattcttagaatattatgatcacaacaatgcagaatcaacaaatacaagtggttttttttctgagtgtctgagtttttatgtcttccaaaaataaggtataaattctaaaaactgaaatcttttcattgatttgcaagtacttaacaataaaatgtttgaaagtgactctcaaacttgtatggagaggaagagtatttacatgcaaggacaaagaaggaaactatatataagaagatgaagtcaaatatacagaatgtgttggaattcacaatctgggataaaaataactggcaccttaggtcactagatagtctatagccagagcaactagaactgtatggacgtcaagagaagactcctaccccacagactcaacaggagccagaggcatcactttcaccagcactgcacaagcacgctggttggtttccacacctctctgccagcaacaaccgtaaaaactgttacctgtctgatgataaataaaattaaaatagtatggatttttttattttgaattttcctaactacgagtggatttgaatatcttaatatgtttggactattgtacttctcttacatagaatgtctacttataatcatctgcctatttttctattgagttatataactttctatatattaagacattaatattcctgtattatccccattcgtctctgggtttctgttcatgatagaggtctccattgtgtgtgtgtatatggacgtgtgtgtgtataatgtgtgtgcatttgtgactgtgttgtgtgtggatgtgtatgtgtactcccttggtttttcttttttgcagagggcttttttaattttcattttgctttgtttgttttttcacttcactttttatacttaaactgttaatatttctgcaatactttttacagatagtttaactgaagatccacttttattgttttctagatggacggtcagttgtattggcactatttctcaaataattttttttcaccatgttgtactatgaagtttaccttatgttatattctcaaaagtactcagatgtgtttctaaattcttgtttatattcctttttatttttctattcttaaaccaaaacaatattctcatttctcatgagagaaaattttcccttgagtcctgataatgtattttatgcacattttgaataattttattgaataaagaatccagtagatgtcttaatttacgtatcaatttagaagatttaaattttatgatagatctttccggtcaagattacatctgcatttccatttcttcagctttttattttctttcataagatattctattatagtattgtgcaaattgaataagtctttgaaactttctttctagcttttcctgagcattgtatagttatagcacattatcagaatcatctccatttctaaatgtaggtaagcagaaaatctttttaaacttatttttctggtgttcatacatcttacaaattttctgattaattttgctatatttgttttactttaatagcttgagttttctttgcacacaaagatataatcaaaaagatcatttcttttttccaatgtttttgcctattattttattttcttctctctttgcacttgataatgatgttggcagctgctaaccctgtctgcttcttaataataactaaaattgctttattatttggctgaagtagataaaaacatgctgcttttgctatttggttaaaatcctttattatatttaaacaattttcttctattgtattttatttcaaatatttcaaggtaagaattatttaactctatcaaagactttttctcacctaaatatgcaatctgagccaatatttgaagcttacatgtcacttacaatcttcagaattttgaaaaaggatggcacatatcaattttcagaaaacagctattgttgttatgaagattttcactttaatcaaggatatctgtgttttgtttgccacataatattaatcttagaaaaatgtgtgcatttctgcagtagaaatctactcatctcaaaacatgtcctcaatgacaaattttcatgataaatttgtaatagtgttgcaatgtctaattgcattgatttacatcccagtcgcattttatatctcttgatcttacagtaaatttaacattctgattactggtactgcttctcctgtcttcagaatatcccaagtagtaattttcagacttattttcaaatccttgcttgtcagcatttgccacaattagaatattgcaaatatttaaggaatactgttttgttttttgtttttttctattttggagcccttctttcattttagttacaattatttcccaatgaaaattcatttcccttgcctcatgccaagattgcaaaaattagttttcctaaattggttgttctactttcaggatttaatgtctttatagaaaattttaattcaaaactaaacttaaatatgttatgatttttcatagcatttttcattactataaaactttttaggttctttttagtcccattaagtatggttacttcccctacgaaatatagtgactgaagtgctatcccagcttctcactatggatcccaggcaactttctatagcttgtctgtaatcaagtttctgatagccactagtctttgcatctttaaaaactacattacatttctcactctcagactaatttacgattttttttggcgggggtaggaacggagtttcgcttttgttgcccaggctggagtgcaatggcgccatgttggctcactgcaacctccacctcccaggttcaagcaatcttccacctcagcctctcaggcagctgggattacaggcacccgccaccatgcctggctaatttttgtattttcagtagagacagggtttcatcatgttggtcaggctggtctcgaactcctgatatcaggtgatccacctgcctttgcctcccaaagtgctgggattacaggtgtgagccaccactcccagcctgcaaatgtttataaagtggaaaatcttttgaaattagagagacctgtgtcagaatcctggctccaccatttataaactgaacaaacataagaaacgttcttcaactaattgagcatcaactaaaaatgtgtgtgataatatgtaccccaatcatttgttcaatttctattaattgaacgttaatgaagaaaacaaatacaaatcctgagaaaaatatcttaatgttaaactaactgcaatgtgatgaaagcattttatacgataaattattgctgagaccactgcatcaattcactggacctgtaatcataacatatattcaattccacaattatggaaagtgtgtatctgctacttgaaaacatttggttggaaaacattttattattttaaatggaaaacaattcagatccttatttcaaattttgatatcactgaaaagattagtatcgtaggaaaagagatcatgttggagagtatgactattttgcttatattcataattttagatgttacatctggagatttaagaaaatataaacgttaattatagaacatctatcactaattacagggaatatgtcttagagagccctgtgcataaatgtattaattagtctcttaaaaccctgattactgctttccctttgcagcctcccatagagcaaagaaattcattataatgaagagatcttacaaaaattcacattatgcaaattgcctttggaaatactatgaaatgtgaacctcccaaaaactttgagaagatattttatcccatgttatatgtaagaaaactgagttttagggagcaattgtgttactaaaccaaagtaagaaaagaaataagtagcaaagaaatatgccattgaggacataatcctggcaaatgatcatcacctcaactgtccttgaagagttaccagaatgagatgactgtttcccagggcaactgaactattaccatattatatctcctaatctctctgcatcctagtgtgagtaggttgctatatcccttcaagaactgaaacagaccatattcattatagcattaatccatgaacacatttatgagttcctctgcaatggctttactaatcttgttcctcttttccctgctttgagttgcattttctgtacagatcccagaaatccagaaatactgactctaacagtaggtagatgcttcaaagctcactttgaacgtgatatactccttcctaactctgcaatagaatcgagcataattttttctttttgggtcacattattcttattcatgttgccctgacccaaccttcaattatttttattatagaatcactaaattacaaagtagaagtgaataatgtgaatgaattaattaagcccaagttttgaatgcacatatttactcagacttttctaactgaagatgcaaattcttcaacaacttcaggatagaaatgtttacaagacagcctattccaatttcacactattctagcctttaagaacaagtttctttgttttttgctttttttttttttttttttttttgagacaggatctcactctgttgcccaggctggcgtgcagtcgtgcgatcatggctcactgcaacctcaacctcccaagctcaagtgacccacccacctcagcctcctgaatagctgggactacaggtgtgcaccatcatgcctggctaatccttgcatttttttcataaacatgatattttgcagaaaaaacaatttatcttgtaaaatttatttgtctttaaattctacccattgaatcttgtggtcttcagtggaaacacaaagcagaataaacctaattttctgtctcacacatacacacaagaagtctttgaaaaatgccaaacaacttaaacataaaacaagcatgaaacagagtacagagataaactcatttacaagcaataacggagaatagaggtggcaacaccaaccaatgacaaagggtttagtaggtggtgttaaagaagctggcttaattcagtgaaaagggaaactggagcaccgcatataaaggtaggctccagctggactaatgatctgagtgtgaagtgtaaaactttaaaaataataaaagaaaatgtagcatatctttgacataaaaataaggtagatcttctcaaaaaataacaaatcatagatttaaaatgtttgttcaattatgcacgatatgagcaaaaataaatgatagttttggcgatatttgcagtgtctaaaaatgacaaggaaatttatcaagaatatacaatgaagtcctacaaatcagtaagaaaaagacagaaatctcaatggaaaaatgggcaaaggatatggaagagaaaccacaaaggttaacacatactggaagaaatgaaaatgttcaaacccgttagtaatcagagatatgcaaattaaaacagcaagataactttttacttctcaaaaaaacattaaaaggtgatataaaacaatattggcacatgtttgaggacatataagctgcaatttggcagtttggactgatgcagacatcctggagactaacctgatggtacttactaaaataaaatataaacacatcatttgtctcagcaatttacattttggattgattctcatagaagcccatggaggacatgttcattgcaccagtgctgtgctgaagaggctgggtgtgatttaagtgtgcatccctgagatactgaatggacaaaatcttgtgtattaaccacatggagtaccaaccaacaattagaaatgatagtttaaatctacacataatagcataaatgagactttcaacacaaatagcactgagagagaaaaggtcttcagaggatataaaataacaccatttacatagatttaaaatatttaataaaatgaccgactttcttgggactttgaaaacatgaataaggatggttgcatatgagataaattgcaatatggctataaatgagagatgaaggtggaaaccaaaaagaaataaaagagaataaataaattattatgttagcaaaatattaaaacacataaagatccatgcgtgttcaaacaataacattatatgaataggggagtatattaatcctctacatttcaagaaaaaaattagtgaagacatcagttgtgcacctgccctaactaaaattgatgtaaggacatatattaatttacctaagattttgcttgctcagccttttgtcctttcctcttgatccccaagacctataaaatttgggcacacattcttggctgactagcacaaccccagtccacaacccccttttttttttcattacacccatcttcagataagagtggccgcagaacacatgtgtccaaacagggcagtcaaaagtcttccaggaagtgttcaccttccccacaatgaaggaaaaaagttttaaaaggcctgatgttcatcatttatccttagtcgtgcaggatgttggtcatacacagcaaccactttgaaaccatgagtatgaaagtcacacagcaggagtggggagtgggaagacaaaagggtcctgatgttttctgacttccttgagcatttgtagtagtcttatctgcttggtgcaatatttcttgttttatgtattttgaaagctattaacattaaattaataatgttgcctcttaattcccgtgacttaagcccaggacagccagtcatttcaggactagtgcattaacctcgtaagtagattccttttctcactaatctccttattttagtcctttggtcatgcatattataatattttagtgtgatgtttgtgtttgtgtttagatatgaatgtaaataattaacatacaaagaatttagaaaatacgtaaaacagccaatatttggattcaaccaataaaatattatcttattttaagttgccatcacccatcttgtaaggaagccacaaaccctgaaactaatgctgattctgacatgagaccagttttcctactgaacaaggctttttattaagaaacttccatttttattcccttgtagtatgcaccaattacgtggccctcctgtgctttttcagaaatccacaatacaaagacagagaagatgatgtaaaaatttacaatggaaaattaatcagaataaaatcttctgtcttcagtgatgtgatggaactactcagtctccatccactgcaaacagcttcttgtatgttcattcagatagttagtggaccatagttaatctttacttagatgtgaagataatgggtaggggagatttcaactggacttgatcttggagaggtcatcattaaggcaaggatcatctgtggtgatgattagcagcaagaggaatagcatcttctgtagcaaaatggtcgacagccccagcagccagagctgtatttacagccgtagggagagccgaatccatatccagagccatatccacagccatagccagaggcagagccatatccacagccatagccacagccagttccatatccagagccatattgacagccggagccatatctacagccagagccatatccacaaccatagccacagccagttccatatccacagccatagccagagccagagccatatccacaaccatagccagagccagagccatatccacaaccatagccacagccagttccatatccacagccatagccagagccagagccatatccacagccatagccagagccagagccatatccataaccatagccacagtcagatccatatccagagccgtattgacagccagagccatatccacagccatagccagagccagagccatatccacagccatagccagagccatatccacagccatagccagagccagagccatatccatagccatagccacagccagatccatatccagagccgtattgatagccagagccatatccagagccagagccagagccatagccatagccatagccagagccatagccatagccagagccagagccatatccatagccatagccacagccagagccatatccatagccatagccacagccatagccatatccataaccatagccagagccatatccacaaccatatccagaaccacaatcatatccacagacagaaccccaggcagagccatatctgcatatgtcctcttagatctgcctttgctgcatcccaacgttttggtatgttatgcttttattttcgtttgtttcaagatatctttagttttcctttctttttattcttgactcatttgttgtttatgatgatgttgtttagttttcatatatctgcacattttccaaaattccttccattattgatttgttgattcaaaccattgtggttggaaaagatacttaatataatcacagtcttcctaaatatattaagacctgttttgaaacacatttcaaaacaacaaaagaaaacttaaatatgttaagacttcttttgaagcatgttttctgtgttttgagcagaattgtattctgctgctgttggatgaaatgtcctatatacgcctattaggtccatttgctctaaagtatagttcagatctaatggttacttacctattttctatctgaataatctgttcattgatgaaagaataataataataatagtataataaaatacaataataaaataatagtaatattacattgtaaatgtctcttcaactatattaatatttgctttacatttttaggtgtttgacattgggtacatatgtgtttataattgttatgtcttcttgatgagttaatccatttaccattatatactgactttcttttccttgttttacagttttttttaattcaaagtctaatttatttgatatatgtatatggtctttttttgtttcaatttgcatggaatacctttttccatccttgttctttcaatctatatgtgtccttaaaagcaacgtgagtttcttgtaggcaacatttagttgggtctttgtttatatatatacggatatatatatatatgaatatatatacgaatatatatatatgaatatatatacgaatatatatacgaatatatatacgaatatatatacgtatatatatacgtatatatacacgaatatatatacgtatatatacgaatatatacgtatatatatacgaatatatacgaacatatatacgaacatatatacgaacatatatatgaacatatatatatgaacgtatatatgaatatatatatatgaacgtatgtatgaatatatatatgaacgtatgtatgaatgtatatatgaatatatatatgaatgtatatatgaatatatatatgaatatatatatgaatatatatatgagcattttcttgttttctgggtgttttgtagatcttttctttcctcctctctgctgtcttccattgtaattagataacgtttttctactgatatatgcattccacagtgagtacttcctgggatcccttcaataactgaaatagatcccacacattattgcagtaatatcttaccactctaatgagcgcttctgcaagggtattactaatctgttgtctttctttctcctgctttggaaaccattttctgcatggactcccagaaatcatttaaaacttgatctaacagtaggttagcctcaaaactcatgtgaaaccttacattcttcttcctaactctataataaaattgagtattatttcttggcattataggccatatcattcttatccagcttgcctacaactaacattcaatgatcctttacatatacaatcacagaatttcaaagtagaagtgaatgatgtggataatttaattaggtccacgttcagagtgcagaattactcagaattttctagggggtggagatacaaattattcaataacttcaggatagggatgctaacaagacaacttattccatcttcatactgtgttagccatttgaaaagtgtcttatttttttaagtcttcctgtctttaaattctatccattggacctagttgtcttcagtgaaaaaacaaaccagaataaacctaattctgtatcacacatataccttccctgcaaaaccttttaaaaatgctaagaaatataaacataaatcaagcatagtacaaagtccagagaccaactcttgtatatgtgataaaatcatagactaacgatggtcaccaccaatcagttacaaatggtgagctgtttagtaggtggtgctggagaatctagcttaatataatgaaaaatgaaactggaccaccatatatagaggtggactccaggtggattaatgatcaaagagtgaaatgtaaaaattttcaattgacagatgtagaatatcaatgaaataaagataatatgtatcatcttttaaataactaaaaagtcagaaattacagtttgcaatgtggtgcaattatgcacactattaacaaaaataaacaaatgacagtttgtgagatttttccagtgtcaaaaataacaagggaattttattaggattatacaataaatgcctacaaatcaataagaaagagacagacacttctgtttagaaaatgagcaaaggatgtggaagagaaaacattaaggataacacatatggaaagaaaattgttcacacccattaataataagagatacataaattaaaacagcaagatgatatctttgtcactgtgcaaacaagcaacattagcatgttagagtaaacaaatattgttacatatgtgaggacagattttgggattgactttcatagaagcccataagggtcacgtgttcattgcagcaatgttgtgctgaagaagagctgggtgtgattatgtgtgcatcaccgagatagcaaaaggcaaaatcttgtgtattagccacgtgaagtatcatatggcaatgagaaataatagtctaaatgtacacgtagtagcataaatgaatcattcactgcaattgtgctgaaagaaaaggggttttaaaaaatatatataataatacaatttaaataggttgaaaatatatagtagaatggccaacttttgggggatactgacaagatgaaaaggggtattgcatataaaataataaataacaaggtgtttatgaatgagagatgagtgtgagaatggaaataaaagataaatgtaagagaataaataaattactctgttagacaaaaaaaaatagaaaaagggaaaagagctatgtgtggacaaacagtaatatgatataaataggacagtatattaagctcaaacctctacacttgaaggaaaaaaatgagtgaagtcataaattgtaccccttcccaaactcaaattgctgtaggaacatatggccatttacctgaggttttgcttcctcagtcttttgtcctttcctcttgatcccaaagacctacatactttgggcacacatgattgctgactagcagaacccctgaacacctttttgttctttacacacctttagctaagagtggtcacagtacacatgtgtacaaacaagggcagtcaaaattcttccaggaagagtgtcccttcccaaataagaggacaaagttttaaaagacctgatgctcttcatcatttgtccttacttgtgcagaatgttggtcatacacagcaaccactttaaaaccatgagtatgaaagtcacacagaaagggtggggagtgggaacataaaagagccctgatcctttctcaccatcttgagcacttgtaggagacttatctgcttagtctaagatttcttgttttacatatttcaaaagctattaacattaaattaatattgttgcctcttaattaccttgacttaagctcaaacaagatagtcattgctgaactagtgcattaacctcatgagtagatcccctgtctcattcttggttctattctaattcttttttcatgcatattttaaaattttgagcttaatatttgtgttcatgtttaaataaaaatgtaaagagttaacatacaaggaattaagaaatatgtaaaacacaagtatttggattcaaccaataaaataacgttgtcttatttaaagttgtggtcacacagcttttgaggaagccacaaaacctcaaattaaggagacattaaggagaccagacttcttagtgagtaaggccttttattaagaaaattctattttttttccattttagtatgctccaattatatagtcctcttgtgtttcagcaaatagtcatggcacaaagattcagaaaaagatgtaagagcttacattagaaaattacactagaaaattaatcagaataaaatctcctctcttcagcgatgtgatgaaactactcagtctccatccactgccaacagcttctcttatatgcattcagatagtcaggtgaccatagtcaacctttacttagatgtgaagataatgggtaggggagatttcaattgaacttgatcttggagaggtcattgcaaagccaaggatgacctgtagtgatgattagtagcaagaggaatagcatcttctgtagcaaagtggtcggtagccacagcagctagagctgtatccacagccatatccacagccagagccgtatccacagccatagccacagccagttccatagccagagccatatctacagccagagccgtatccacagccatagccacaaccatatccacagccggaactccagccagagccatatccacagcccccacagcagtttctgtagtagttgcaacacatgatttcaggaggttagatttcagttgaggtgtaggaggatatttctgaagtgtgactgtcctctactcttctaagacctttatatacttccagggatgcatgggtcatcctcacatgggctctatttgctcattttataatcatctgcctaaaatgagctcattctgtgtacatctactttctttggaattcataatttgcttatgacttccctaggaatatttttatgcctgaaaagaaaacaaatatacaagttctaaacacacaagcttatacaaccataattttgttttccatagtttcatttcatagccatgacataacacatcaccaaaatatgtttgacctataaatgtatgtttatctttctgttcttgtaaggtcttgagaattatctatttaataaggagttctcactgctcttaataccatcatcatcatcatttcttcttattctttcctaataccttggtgttcttttcttatcatagtcactaaaaattactaaatcatggtttttggacaaagaattgggtatttccacgtgctacctcaacttcttgaaaccctctccttctctctgaagaaaagtttgaccattccccccttttctaggcagtctatgaccttctcttgcttgaaaaaaaaatttttgttaaacgtctgacaggtcagttatgtaatatgtgtcatttaaaatttatagaataaacttttgatttttccatttaaagtgaggggaattccttggttcacaactttgttgttgatgtccagttgttaaattctgttcttaaacacaggtttgtttgtgtttaagaaccgaattaacaattggatatccataataattggaccactctgatgtttatgctgtacatcggtgctttctactgaataataatttccagcatatcctggacccaaaactgaggtggagcttcattggatatccttaacccacactgctgataccttctactgcccttctgtgccacacccaaaaatgcaggagctctgtttcctcctgcaatgtccctgctgcatcctctcctgagaaaacttgaagccatgctcacagtgaaggagaaatacttaaaggaatcccatctatcagcacagagaatatactgaaggatgaattagatgctgaggggccacaaattgataatcagtacaatgtcctccatgttccagaggctctgtagtagaaatagctttccctggaaaacagattggttaatttcctgactgagtcttttcctaattatatgaccatggaaaatgtcctcaacttagatgaacctcagtttctgcaactgccaaatgggaataaaaataattacttttatttaaaattttattaagaggcctacagaaaatacacaggcaatataagtagtgtagcaatgaccctgatacatggtggagacaaaactttttctttcttttccccttttcttttgcccaaatataagcattcctaaacagtaacagcttttcaaatttctgtatatacttgtattgatctatttgttgtactaaaattttgagatttgaattttaattttgctatttttaaagtatgtgatatacatatgtgtaaatatacatatgtcaagtaatgttttcgtaataaactttcaaaagtgagcaaatgctctcagaaaatgaacttccatgtaattgacctcagtttaccttgcctgaagcattttatacaataatgttttgtaaaaatacagaatcaaggaacacatcacagggctaccaaaacagtgtggtagtggtataaatatagataaatagatcattgaaaaagaagagagaacccggaaataaagccatattatttatagccagctgttctttgactaagtcaacacgaacatacattggggaaaggatatcctcttcaataaatgatgctgggaaaattggattgctatatgcagacgaatgaaactggaccccatctctcaccatatacaaaaatcaactcgagatgtattaaagactgcaatgtaagacctgaaacaataaaaatactggaagaaaccctagggaaaactcttctgaacactggtcaaggcaaagaattcatgacaaatacttcaaaagtatgcaatgaaaacaaaaatagatgaatgggacttaattaaactaaaaagcttcttcacagcaaaagaaataattaacagagtgaacagacaacctgaagaatgggagaaaatatttgcaaactatgcatctgacaggggactaacattcagaatgtacaagaaactcaaacacttaaacaacaaaaaaaaccacaaataatttcatgaaaaaagtggacaaagaacatgaatagacattttccaaagcagacatccccttttaatttttgagtcacacttacatttattacttcattgattcttataaaaacaatgtaaagtaagttgtgttttttattattttccagctttattgaggtatcagggacaaagataatcatatgagcttaagttatacaatatgatgatttgatatacatatttactgagaaatgattgacacaatcaagtaagttaccacaataatcacataattagcattttggttttgttttatggtgagaacaattaagatctccccttagcaaatttcgagtatacaatagagtatcgttaactatagttagttaccgtgtggtaaattgtatctccagaacttattcttcttgtaactgaagatttgtacccttaaactaacatcttcccatttcttccacctcccaaccccttggcaaccaccattccacattctgttttttgagttctacattttagattccacatataagtaagattactcagcatttgtctttctctggctgacttgtcacttagcataatgccttccatgtttatccatgctgttgtcaatggcaggatttctttcctttttataatatttcattacaaatatacaccacaatttattttttcattcactcattagtgaacagttaggttgtttccatgttttggctattgtaaatagtgctgcaacaaacatgggaatgcatatatctctttgagctactgattttgtatctttgacatataaacccagaagtagggctagatcgtgtggtagttctaattttcattttttaaggaacctccatattgttatccataatggctgtatgaatttatgttcccatcaaaaacagtgcacaaatgtttcttttattgcacttcctcgccaacacttgttatctcttatcttttttataatacccatcacaccaggtatgaggtgatagctcactgtgattttgatttgcatttctctgatgattattgatgtaaagcaactttcatgtacctaatggtttttgtttttacacacgtcgcagatgtgaaaacagaagccacaggtagttgtcacttgcccaaggactctcagctgtttagtggtagagtcaaatcgatttaactcctgcaagaatattaaagctcaggaaggacccataaattattttttcctttagtttttcaaatggaaaatatgcacttcatttgactaaaattgccaatattttgccacttttgtcttacacctctatcatctggattttctttctttgtgatctttacaatcctagccaaaatgcctaaaactctataccatcttctagtactttcataatttaaccttcatgtgcagaactttaatcaatgtggaatttcttatgtgtatagtgtgaggtaggtatttatatcattgtatctaaacagatgggagattgatcaatcccattgctgtgatttaaatgtttgcccccttcaaaattcatgttgcaacttaattgccattgtgaaggtattgggaggtaggaccattatgaggtgtttaggtcttgaaggctccaccctcataaatggactaacaccattatcacaggagcaagtctgttattgcgggaatgggttcaccccgtcttgctctctctcttgccctctcttggtctttcaccatgtgatgccttttgccatgttttgatgcagcaggaagactctcaccactttgatgctggattttccagccaccagaactatgagctaataaatttctgtttatcataaattacccagtctcgggtattctgttgcagcagcataaaacaaactaagacacacatttactgaataaactatcccagatggaaaatttgtctacacagggactttgctcctcccctgaattctgcagcactggcaactgtggtcctattgcctcaggctgatctactccttatacctggataacatggttagacttcctaatctttgctagtggcctaacatgacttctctttctagccagtgtccttacctggccagttggttatgattggccctctaggacaacactctacaatagaaatataccatgaaacacattgagaaatttaaattttccaatgtccacattttaaaaagataaaaagaaacaggtgaattaattttataccatattgtattcaccctaatgtctcaaaatattatcatttaatatataacaaataatttaaatgtatttgatactttcattcttttttttctattaagtctttgatatctactctgtattttacacttacagcgcatttcattttgaattatccccattttgagaactcaacagctggctagtagcaccatatcagacagtgcagcttactcaagagacctgataattcttttatggaagtggacactgattaaaatttcccagtggggcctcctactctttcaataaactgacagcttattttcttctttccttgaatttcttggccttgaattccattttccgtctcttgtaactgaccaaatctacctcatcctttatggctctgttcctatcattctttggaagcaatttctgacacttgtcgagccttctctttccacattctgatttaagtttcccccttgagctcttcttggtaacaccatcgtacctacaagcatacctgctatgtatgatttagtattttgtgcccagctgaagattctgaattcttagaagggactatgtgttttatctctctgtctccataccaatcacagcacatagctgaaacatgaatcttaatgtttgttaaagaacaaattttacaatttagattttacaatttagagcctctacaatatgtaataatgtatcccaaaaaaagacttttgtgttttttttaaaggagctttgaagcttaaatcattttccaaccacagaaagtattgtgaaatataaatagtttttcctttcctccataatgtgattacatatgtgaattcaaatattcgtttttcccaacctccaccaaacaggccacacctacatgagcatctacacacacacacacacacacacacacacacacacacacacacaaaccttctctaattttatcatctctgtctctgttaacattatcaccattttctcattgcacacaagctgaatgtctcaaaattttcttaaactgagataatcacaatatttcaggttttgaagataagttaagtgttatccactgcttgtaatactataataacttcagagttccagacagcacagttagtcctcagatctgactcacaaatactccagatgggaaagctatcctgctcttggaagaaacccctattgtccatcagtcggacagattctatcctggacatagatttcctcctgggctgatattgattgtagggctatctttcttagagccaggcattttgtggggtcacccagctccagggacctcagagagccagacttggtgtaatggtccctgttgtgtggatgaaacagggacacatttattactgctgattataacaagtttctactgaatccagaagactttctctgttgtaagatttcagtgatagagtttggatggtctagaactggaggaaaggacactaaaatcagaatcaaagaagcagtaaacactccacatcagaaagtcagccaggaaactagaacagaccctttaatctcatttttatgaccaccccaatctaaaaagaactccattaagatactagaccttgctcttttctaactgaaaaatgtgtcatcaccttcatcatacccaaaacttaatgaactgctgtcccccttggcatttgctactgtcctttttagtctttctttgctgctggaaatgttgtattatgagctcaaatgtcataacctcaagatacttccctgagctgtctctccagtacttcaaaccttaatctcctctccattaagctgtttcattccctctatagcaattatctgtctgaatttgttataattagtttttgcttcattattattattattattattattaattattttagacagagttttgctcttgttgcccgggctggagtgcaatgacgcaatcttggctcactgcaacctccatctcccaggttcaagcgattctcgtgcctcagcctcccaagtagctgggattacaggcgcccatcaccacgcctggctaatttttgtattcttagtagagacggggtttcgccatgttggccaggctggtctcgaactcctgacctcaagtgatccacctgcctcagcctcccaaagtgcagggattaacaggcatgagccaccacatctggcctatttttgcttctttaaatcttcatctgttagactataaacattctgagagcagaacatttgcttataatttttcttctgtgtcttcaggatggtgtctattcaaaaatatttaagtgaattaaatagcatttctcaacctccatgtaagcaaacatatatatttgtacttttgtcagatgtagatacatttgatagtatattttttctttgaacttacccttttttaggtttttatttcctcttgcctaacacttgaccctgactcaaaattttcaacaatcctggaagtgatctctcctattgcattacttttttttgtgtgtgtgatggagtctcagtgtgtcacccaagcaatctcggctcactgcaacctccacctcctaagggttcaagcaattctcctgtctccacctcctgagtagatggaattacaggcacgcaccaccaagcccagctaatttttgtatttttagtagaaacagagtttcacaatgttggccaggctggtctcgaactcctgacctcaggtgatccacccacctcagcctcccaaagtgctgggattatattacttctttaagcactcaggctatatctcctccctgagacttttgtcataacatcctgaataggtgtcactttgcctccctttccccctccagctccattctagacactcagtgccatttccaaagcacagttctgaaatactctgtgatttgtgcttgggtatgtgagaacctgagcatgtgggatatgagaagcaggtagagaagacattatttatgatgcaagcataagaggaaataattgcgttatatcaaggaagtacctaaggttcagccaacatactgttagcccaattttcaagagattccaaaacaccccaagaaagagtaattcacaagcaagtacacaaagatttttaggaataaagaaccatttttattacaaatgattgacttccgcaactgtagatgttatgatcattaacacagtcataacagagaatcagagattaagggagcaaaagataacatttggaaaacagtcagatgacaccatggatcctatggccatgatttcattcaaagaaatgtgaggctagaggtcgaagattctgtcaagcatgtaattcttggatatagaaatcttggagtacgaatccttgaatcagcattatcttcagacgtgtcattttagaagcaaatggtcctccgacagtgatgttttagcaggaagaatagcatcttctaaagcaaaatggccggtagccacagtagccagagccagagccatatccacagccatagccagttccataaccacagccataatgggagccaaacccacagccatacccacagccatagccagttccatagccacagccacagccagagccagagccatagccacagccacagccggagccatagccacaggagttgccgtagtagttgcaacacatgttgtcaagaggagagaattgagatgggtttcaagaagatgcttctgaggtgtggatgtcttctacttccctgagacctttatatactgtcagtaattgccaaagcatatcactcattccctgacttaggcaacaaatatttaatcaattattatgtgccagtcactgttgaccatcaataatattttgcttaaaatgagccaattattttggagactctagtttcatttcaggaacatcattttaatctgctctgccaaagaactgcctcaatgaaatcatgtgcccaaatataaagctgatactaattttcaaaatctcctatcagtaaatttatatcttacataacaagttttgggaggataataacaaaattttatcctttttttcctctcttttttcctaaaatgtctacctctacccatagggaaggagacactcctatctcctttcctgagtcattacaacttcttgccagacttctttctccaactcactctgcacttccacacctaccccttgtccaacctccctcaaatcccaagaaacatattcacatctgatcattcaaagccagaatgtatgctatctgcaagtgcttcctacattttccttccatccaccaggcaaaccaagaccctggggaggcagagaagccctccttttgtctcccatttcttcagctatataagtaattgtcattgaggagcctttttaaaactaaacagcttcatttggataaggaagtaaaaaaattcattcgaccagaaactcagttctttcctccaatacagatttcatcaaagttttgcatgatgaaatacagatacattcctagaatttaataaaccatttttcttctcctttcactactattccttggacatttacttcagaagctaaaggatagtggacaattttaggttactgacagcaaaagcccaccattaacaactaacccttctatgatataaagtagcacaaaaataaattttgtcccgtttccatacacgcatttcacactactcattcaaaattctcaattacccacttattacaagttctcaatcttctacaaaaatattcatcgtgattttgaaatccgaggtgccctccttcttcccaacaatcctctctatcacacttaccttttcaagatacaaaagaggaaaattagtatcattttttctgccattagtatttttctcatcaccctcaattatcaaccaaaaaaaccttctgtttatacatcaaaagtcagatctggaatcactttctacaggatgcctttcctcattgctactgtggattacattttcccttcagttggaaatctttccttttttttctgctatctgtcactcgtctcatctcatttctctgctatgtttagtcccttaaaaaaagcataaatagatctctgtctcaattttttcttttcctttagtttctttctgttttttcatccttgaaattcaaaactataaattctacttcacaagtggatcctcttgtttgctcctatatgcagacgaatataatagatttgtcatgctttggtgaaactttatcctgtttactaataaaagcatgatattcttgaggaaagagactatacctttcacagtagaaattccaggcaaacctgagacccaatccacattttacataagaggaacttaagagtcaataggagtcaaagactagacccaaactgaagccactgtagcttcaatttgggtctagtctagatatgactgtagcttcaatttgggtctagtctaggtaagactgtagacatgatattggtgccacaaagaaaattttttctactgaggctgaaaacatggtcagaactcaggaattggtgttgagccataaaatttatacgacattccaaaattgtctaatgtgtatggcatctttattttctctaatatttttacaaattttatctttatagtcatagcagggccatggtgattctgcaagaggatacctgtaattagtgcttggacctgttacttatgtatctgttgtatatgtatatatgtgtgtattcatgtataaaactatatatatgttaccatccattacctcaactgcaaatttacatgagcaagcaacttatctctccacttgcaggatacagaatatccatctggtatactgaaagtacttagataagcaaaggattcatgggaaaaaatatttttcaataaacttcaactttgcattcctatcactaaaggattgaaacatttatccatccataatacaaattaagagtagaatcccatgtcatttatcagggttctttagacatttataatgactgatggtccttgtaataatccaggtgagttagagtagtgggaagtgatcacacagacacctgctcctagttattggtattataggaaagatacagaacttagcagaaatgagatgctatgcagaactgagcagcttgccttgacctgagatttccctctctccttggttcttccgtggggcaaacagctgccaataacattctatgtgcagtatggtcctgttggaattaagtaaatatgcaagctcctgctcttcacttccttttgcactcccgttcacatgaccatactggaagaacttacactgagacactatcaacttcatttaagagaatatttacaaactctgaagctgactggttcttgaagcaaacctagatgtggagagagatgaaaacaatgtcagggcttccagtgccttggtatcttaatcaacagtgcttcccagctttcctgtatccttgtattcctaaagtctactcctgaagttctaacatcaggtttaatccaaagaatgagaccacaaatccatttacctgcttcctctcttctaactaaaatgcattcagttttcactgaattcacaaagattcacaaagatttcactgattcacaaagaatctgtgctttttctacattgggtttcctcatctccagttttagtttttaaattataatatgtacttaaacatttttgttggttgcttgctttcttaggcatccattgaacaactcagctgaattccacaaacactaactggactcatgccataggaaagatgttgtcttgggaactgaaagttttcaaagatagatcacatgtggtttttgactcagggtcaagcatctgcacgaataaagtggctcccccacaaaatgatctctgttcctcttaggaccaacttaccggtttactgcccctactttagggctcatttctttccacactacaagtaaaacagacacaatggagctagtgcacatccatatcagtggttctcagtgatgggtgtttttgccctctcagagacacttaataatgtctggagacatttcacttgtcacgacttggagagcgggagaagttactggcattactggcatctagtagtagaaaccagggaagtagctaatccgagaaggcatagagtactccccaacagcaaagagtactgaggtctagaaaccctgatttatagctatacatcaataagtaggcttctaaaactacaggtgtctaattgaaactaatcctttcttctcacttcatgcccagcatctgacccttcgatcaccaaacatatagtccaaaaaggtgggttttttcttgtttctggtttgtttgtttgtttttaacttatcttacttgtctaggtttcatttaaatcaccattttcagaatcaggttgactctacacttttaagttatttttactataacagccacaaaatccaagttggaacagaatacatactcaggaagatcaattcttctcctgggtactcgaatttgacaacaaaggaatgagtggtgatccagcactttattaaatgccttcaacagggattttcacaaagctgccaatttcattttctgataatctttattatgagacatttttccttcagtcgagaaatcttcctattttttctgccatcggtcactggccttatctgatcactctgctatgtttcatccgtaaaaataagcataaagaaaataaatctctgttccaattgttttcttttacctcggtttctttctttttctatcatccttgaaattcaaaactatcaattctacttcacatcattccctggaatagacactttgcttttcaacactactgccaatactcacttccaggacacaatacccctgagttattgaaaaggtcttctatcaagattgcattacttctaatcctttccactcagatctctggacactctttcataagggcagaaactatctatattccctgaaaatccagctctgaatacatgtttggcacataatttgcactcaatatttctctaccataaaaaagatgattaagtcaaacatatgtttcattgtttgtgtgacatttataagccataagatatttggatatatgtttaagttctctgaatatcagtttcttctttctaaaatagaatctaagcattctcacatccttttttataggttacatgcctatgcagtgctttaggccaggaactgtattctataaatgttattcctttgattgcatttttctcataccatagttttgaattttcatctaataataggttttcgaatatccatacttatttttacggaaatgctgattttatcagaatttaatgtgataactttgtaatttaaaggaggttgttctatggtatatacacacatgctcttatttaaaatttttctatgatgaacaaagaaaacctcacagaaaataaattaccctcccagtagcttttgtacaccctgactgagccattctgtatagtaatttattactaaacgtacagtgtcatccgtatgtcattaggaatagcatcatgtgtattttcaagcttagcaattacaagatgattttatgttgcatttataaagcatatcacttgaaaacatgtttagctaccaatcatgtgttatgtaaaggaagctcatgtgatttgttgttgttgttgttgttgtttgtttttgtttttgtttttggaataccactagagtcaaaagatcagcctataatacaaaaatattttatttttagtactatggctgttttgatagcttcattaagtgtcatcttatagtaagagttttagtgaagatcaaggatgtatcatacagtaaatcctaaatattaataggaaatatgttttagagatttccataatttgggacgtacataaatttccccacttattgtatagtatgttttttccagctttcgattccaagagttttcttgtctaaactttgattaaacaatgaagaaattccctctaaccttccatctatattgtagtttgtaaagtgtctttacacacattacttcaattcattctcacaatctggtgaaatgaatagggcagatgctactcgaactagtgtttaaggaaagaagctgaagttcaaggttattaaatcactagtccaaagtcacacagctgatgagtgtcatccatcaagtgcccctcctgaccaggccctccaaatcatcaatgaggtctgtgctgctccctgggtacccttcttagactagagaaaggctaggaatttcctctataaatctgcttggttattgcagttctgccagtagtgtcataaatgcataagaagacggctttttgttctgctgccctatctcactggccattcctgttcatgcctcaggcttcaattcaaatgcacctcttcttggaaatctttcctatcttcccacaaataatccctctgtattttaaaactttcatacttatcactataaaaacaataacttctttctatttgtaatattatcatataacttaaataaggttactgattcactgaggactgaccccatttggatagacagttgatgggtaagcaagtaggtagatggatggaaggaaggaaggaaggaaggaaggaaggagggaaggaaggagggaaggaaggaagggaggaaggaaattctccaaaaatctaccataacatgagctatttctctcttttcttagcctctaggttgaataacaactcctttcgacagtgctgggtactgactacacagaagacctaattttatttgaagaaagaattattgagatttcacaccagccatgatagtctttcaatttatgtaagatactttgcattgtgaaaaactgactctcctctctcctttactttcttgtctctgtcagcaccggcatcattttctctgctcatcaggctcaacagttctgagtcattcttgatgtgaagttcacagaatttcaggaccagaatgaacactaggtcaccacctatcctggagttctcactctggtgattttgtctgtcttacccgtgattgggaagcttccatcatctatattcccatggaatagccaatttagctctcagggatatacttgtaaaaaaaaattagaggctattgcccattagtcccaattctgatctctggagacaagaagcaaatccaatcctcttgccatattataaacctttaatgtgttttgataacccatgtcacttcttcctgacaagtctaatatctttcctcacaaaagatcacaaggatgcatttccactaagtttctcttccttggacatctcatctaccttcctctttcatcatgtccaaggctgaaatacttgacctccagcatgtttcatgagtccatcactttcttccctttatcagtgacaaaactcaattcaggcccacatcacgtcattcctgaattctcctaggctcatgtctcttcctctccaatccatcctacaagatattagaggtttgcataaacacaattctgaatcctgtgcaattgcatatataagcatgtgtttctgttatttcagatgtgagtaatcaccaaatagtaaattactgaagaaaaattcttggataaatgtctgaaaaaatggcaaagtcacaggtaaccacacacataaaatgataataaaacaggaagatcacaaaatctgtagtaatggatgatttaaaataagatggatgacacagacttgatagattcaaaaatgtattttattgggaaactgatttgccatgtagagcacaaatgctcatggccatagtcacaccattggaagaaaccatgaaacttaagggttaaatttcaggaaacagttggcatataatctttcttccattaacatcaaacctatctatggcaaaaatatttcaaagggatttaaatagagtcacagctgtcatcctattgttacttcagcagcaaataatgctctgatagtgattttctaacagaaagacgtctagcatgctctgtagcaaaatagataattagccattgcaaacacagccagaatgagagccattgacacagccgtagctcgacccatcaccacagccagagccagggctatatccacagcctccacagggatctccatagtagtagcaattcacggtgttaggaggtgaacgtcaatgaattataaggggtaattctgcatgtctgaatggtccccacaatcgcagaccttcacatgcaatcagggatgggtgggacacactgagtccacctggtcagtcccatagcaatttgcttcaaagtagctcattttaactaggcactccagttttgttaggaagtcactccaatattgttagaaaggctctttctaatgtacttttacccggggtttgtctctagttgataatgagcctggagcaatactggcttctttttcatcaatgctgttctattaaaaacatcccacatgtgactcgtgacccaacatagaccaaaatacgtggtttgtcctctaactaaatgaagtagccatgagattttgtctgggtccgtgtgtgtgtacatgtgtatatgtaaatatgtagaataatattaatcctacttaacagggattttaattcctgttaagaggggttttttttgtctagagttgtttttttttttttttttttctaaaaaaatcaggtgacttggctagaaccacacagctgtatgacagaagtataacttagtcatcagactccaaattccatattctttgagtctgacttaaaaagagagcagagtccaaaaaatcagctttcataaaaacattgaaatgccaatattaccattccataaattgtgaacatctatgacttgttttttgatgctaacagatccttgcttacatttcattttgaccttcataggtttgtataaaccaaatgcaaattgaccatttctacctctgccttctatgagttccaagtctcccttaataaaaaaggcatcattatcacttgcccatccaatcatgctgctcaggatcagaactgtctaccattcttcttcctgaaagaagagttaggtaaagatagggctaagggagaatgaatacagttttttctgtttttcaaattatgggtctaagcctgtgtaaaagtatatcatctttaaccatgatcatatataattaagccatgaagtacaagccatcttgagatttggacttccatcactattgtctgtgcctttctttctgcgctaaaaaaaaaaaaaaaaagaaaaaaatccaatacctacgcaattctttaaaattccatgaatccttccacatagcaggctcttccctgccttctccctagacaattatacaatggtgatatttacttgcacaaatttaattggatatttcactacatagtcactaaaccaatcaattcaatttatccatcatggattgagagcatgccatatgtaaggaacaatcagagccaatcatactggtttgcaatccgtgcagtttataaggcccagtgctcagaaaaggttcctgtgtttggagttttaagttcttaatacttttatctttgaatttgtggttcgttgatgaagtctgtagggaatggaacatgtgctggggtgctgggatggggtgtcaattcacacacagtcccacctctcatctccagcccacctccccagaacaggtctttggttttcagctccctcactcagtgactgctgccaccttctttccccagcaggagcctgaacacaggcatgggaaaggtcaagatggaacatctacgaggatctagactcatccaacagatattcccatgcccaagagcacatgacattaatagcaaacaaaaagcatcatgacatgtcaagaaagcacgttttccgtttgcactggactctgcgaattatgtagctgaccctagataaagcccaacgtgttccattgccctccagacttcgttgagaggatgtaagtggcaaaaaacacacattctcagaccttcaagtttccattaatatttcaggagttggtccttaaccccacacactcatccaccactcactccaccttgtttcttcccttcaccaccaagtttcttcaacaagtaggctgtgcccagaattttgccatccttttactcattaatttctcaattaattgcaatttctgttctatccccatcatataactaaggctgctctcaataagtcaccaaggatgtccttgttgcctggttactaaatagaccatagcattatttaacccctttgaagcatttcacaacacaaacccccatctccttattgaattttaactcctaacctcatcatttttccttgaaaatacataattccttacaaattacaacagatcaaaagtctatattttccacttaccactgaactggtcttgctgcaaaatattctcaaatatattcccaaacatattattaaattggtctcttaaagtttggttattttattataaatatatcttaattaatattttgataacaaataaaacaaaatgaccaaacactcagataataaacaaatccttgttaagtgttatgtcacattgcctggagcattttgtacaataatttattaccaaacataaatgctcaacactatgtcactaggtttgacatcatggcatagtttaaagtttattaactgtggtggaaacagatgttacctgttaaatacttctaacctagaaacattattatgcgtagtatatagaaagggcagtatgacatgatactaagtacatttttttctttatggctactcaccaatgaatgccagcgatgttaagaacctaagtcaataacctattgagtcattctctcataccaggaaaaataccatccaacagaaaaatatatgtatgcttaattaattaagcaagtcttcaaaactattttatatatatattatatatatatctcaatcacatggttacatataacacatggtctcagtcaccaattcatggacactttgtgaatgcagtgaaaatatatatatatatatatctcaaatatatatattctatatattatatatagaatagtaatatataatatacattatatatagaatagtaatatataatatatattatatatagaatagtaatatatatatcaaatatatatatttgatccttgtaaaagtactgtaaaaggcagcacagttattttaattccagttttacagaaaggataaaaatgagactgaataagaatgagtttttcctaaggtctcccagctccgaagtggctccataacacctttcagatccacagctcactcttctctggacccatgtcttgcaagatggtttcccagcctcttactgaagacttgtcataagaaaaagataactagttccccccaaaacatcattccattaaaaaaatttccagctatcagagaaatccctatatgcttcagagtctctcaacattcaacaatgaatagttcccaacgcacttagcatctctgtggaactattgcctgcactgggtgcctcttaaagtaattttcatgaatcttgatgtaccatcctttcctaatggtctcccctgttcccagtttccagctggtatggcacgctgattgatggctgcagatgagctgatgtgacgtcttctaaccaagcctttcaagttacccaaattctgtgactatttgcaagggaagcctcagactgtctctgctaatctgactcttccagtaaagaccagacctctgtcaataagatggcatgttattgatgccttctcctttttttgatccctctggtcatttctgcaatcatccagcagtctacctcccattcatccttcgaggatgatctttttgtctcctggaactttccactccccatcatctctgactttgatgtttctttttttatttttttccaaagcaccctctcataactattagaaatattgtaacatctgtatcataacctgccagtaaggtgctggtaaatgcacttactgggaaaaagtaaataaataaatacttccatcttagccagtttcaaaccaccaacatgatgtcactgattgtggagctgagacgagatatacacaattagccttcacaagccaacacagctagctctagcatgctgctgcaagggaggcatctcagtgtggcacttaagaacatggattctggcttcaactctgcctctgccactaattagccctaaaatcttggacaattcatttcatttgtctgtgcctcacttttctcatcttaaaacgaatataatgatagtacctacgtcttagggttgtgaagattatttgagctaatatctgtaaatcacttagaatagcacctagccaatagtaagtgctatttaagaggttttatttttaatataaattagaatgtgtgatcttgttatctctcccatacttcacaggtgcaaacttcttggagtctagaactttatcttatgccattaaatctacagcatctaataaagtcattatataaaattttataaatgtttgataaatgactattgatagttcaggatctagaacagaggttggtccataaaaggtgaatttttgtctttcctcatagcatcaatacacacacacacacacacacacacacacacacaatcttatctgctcccgactttgaaattctaatttattctattctagaagatatctctctacaatgtggtcagatttctaaaactaactgataatatttgatctctctctccattacagaattctatggcaaatcgtgttattttttctgttctatattcagcatcatcattcttctcaagcctctgtatttgaaaatcactttttgttcatagaatcccagaggttagagtaaaaagaaacttcagagggcagttagctctgcccagctcccggatgccaggactgcattcacaaagtatccatgaattggtgactgagaccacgcattagtatctttagagacagggtaggccataaaattatcaatccgcttttcagatgcaactaattattaaaggaattactttttatttattattttattttattttattttattttattttgagacagagtcttgctctgtcacccaggctggagtgcagtggcacaatctcagctcactgcacctccacctcccaggttcaagtgattctcctgcctcagcctcctgagtagctgggactacaggcgcccgccaccatgcctggccaattttttgtatttttagtagaaacattgtttttcaccatgttagccaggatggtctcgatctcttgacctcataatccgcccgcctcggcctcccaaagcgctgggaatacaggcctgagccattgcacccggctagaggaatttcttatgtcaagaagtctgacccattgaatcttctattcatgaattctgattatggtctcttgaattgtacaaagcaaatagaaaacagttaccttataatcttcaaatatacaacaccacaggcaatgtttcctgctccaacttttaaaatcataaacactataaaacagggttttttttcctagtaaggaaaagtatccacgcttttattttcaaatgctaatgttcagcatatctgataatttaatgctaacttctttccttgtacttcctatatcttgcctattatttttatctttatggacccaattatagtttgttttctaagcagatcactgtgactagctcacaaaattgttgtatatcttctccgaggtacagaatatcattatcactgctgttccctaatgacagttaaatcacagttgaatatatacagaaaaagagggatcactccaagagtttgtttttcttacagtaaagggaataccaaagctcaacaatatcgattatcgatactcaatacaaagccttaagttctcattcatttgtataaatgtcttattagtaaatcatgattggtaaactttgataatttttatcctcaaaaaaagccatcctcccagcattctgccagaagccaataatttttctgcatttgtttatcacatttcttctctttcaagtagttttataatgttgctttttttttttttttttttgagacaaagttttgctcttgttgccaggctgcagtgtaatggcatgatctctgctcactgaaacctccaccccaccgggttcaagcaattctcctgcctcagcctcccaagtggctgagattacagacatgtacgaccacgcccggcaaattttgtatttttagtagagacagggtttctccatgttggtcaggctggtctcaaactcccgacctcaggtgatccgcccgcctcagcctcccaaagtgctgggattacaggcctgagccaccacacacagcccaatgttgctatttttaattaactttgttggttgttttaacaaaaaaccaatcttattaaatgcatacaatatacaaaatcgcacaccatagtcaacagagttctaagacggccctcatgattcctacctactggtgtccatgctttcgtgtaattccctcaccttgggcataacaggcaggacgtgtaacagccttctaaccaaccaaatgtagtagaagagatggcatagcacccccatgataatgtgacttcacagggcaacagtgaagaaattttcagttaatggttttacaggtgagtaaagtaaacacatgacttaagaaaagaagttgcttttatctgttgttttattgttcatttagaattttgtatataaagcaaagattcatagacaagccttaatttaaaacaaataaatagtatcctgggtataactttgttataatcttcaactggtagctttttgtttgttttctgataaaatctatgtattccttgagtataatttcttttcttgttcatcttatgctcccattgcctattcataggcaccaactgtactcataggctgtcattaattatttgcttaattaaattgaattgaattgaatcaggttggataaaagaaagtaattcttgcagtaatgtctttgctacattaaacaaaagaaagactgaactcatagagaatctttattaagctattgtacaacataaaaggtcaggaatttctgacctagagcaattgaaatgacactcaaaagaaggagaagttagtcataaggaacacaaacagaatttggcaagacaatgtgtctggtagtgaaggaaaaggaggagcagatgatgttatattttcagaccttttcaatttggcaatggcgacaccattttaatacttatcactacttttctttatagttaagttgacttctgctctctacatgtaagttctttgggatcaaggaaagattcccacaaagtattgtgagaaaatgacccagtttacattacttggcaataacagtgattaaaatgagtaatgagaactctgatattcatctccgctaggtattactcattcaagagaagctcataaaagcaatgatctagttaacaactttacacctatggctaatgttgcaaccaccacaatcccttattataaacacagtttatagtcacgacgtaatttattttctcatcttagtataacagcaagtgaggtaatcatgacaatgtataaatgtgggcctgcctggctaagcattcctattaggagtgactctactaatttcatatcagacagtttctctctcagaagctttaaattaccaacaaagtgtaattggttaaatgtctgggaggatgtaaatgtcaacaataactggtcattactttttctgaattttaggagaattccaaggaagctggtatgggggtgtgatcccaatttgtacagagcggaagcccaaggcaggccatgcctattggcctgaatcgtgctgatgctgattttagaaaagcaagcaatgcttcataagtactgagactgtgtttggaaccaccaacgttctaaaattaggatgtaatgacaaaccatgtgtgatgttttgctagtcaggatatattttgtgccaattacacaatttagttgccctggttttttttttttttttttttttttttttttttgagacggagtcttgctctgtcgcccaggctggagtgcagtggcgcgatcttggctcactgcaagctccacctcccgggttcacgccattctcctgcctcagcctcccgagtagctgggactacaggcgcccgccaccacgcccagctaattattatttttttttttttttgaatttttagtagagacagggtttcaccgtgttagccaagatggtctcgatctgctgacttcgtgatctgcccgtctcggcctcccaaagtgctgggattacaggcgtgagccaccgtgcccagccttttcaagagaacagaactacactcacatactgcatttgatttagaaagaaaaagaagaccatctcaaagaatacacaactatgcccctacaggtcatagaaagcattgtatgtgcacctgagaattaaagtccataataagacctataataaaacaggcagcaagaagattcatgacaatgcgatctaaactattcatgatacgagtttgaataattcattcaaacctaacttttcttttcattttttaagacctgaaattcaggaaatacacaaataaattgcaaagctacaatttcatacattttgtcggatataatttgattctgcccagatttcatcttcaagagaagaaagttaattgcttttttacctaaaattatatgcagaaagcagaacaaattaatttgtaagacatccttggcttatatgattagtgagtaaatacctacccaccagaagtagttttagaaataaattttaaagttaaaaaatagaatgtctgagtaggagaaactaggaggaggtagagatcgatttagattattgcttaattttttaaaatttatcttgtaagtaaactagtataaacattgtcaaaaatgtaaacaaaatcattttgggatagccagatctccttaacaatgaataaaaagaataaccaaacagcagactcaaattgttcaagactttatgaaaatatttaggaagccaattaaatgattcgccatgtcacagaaaatgtaataaataattgcattaggaaatcctctaggaatataataaataatgcaatctttttcactcctgttgaattttgtgctagtatactcagtcaatgagaactcagcaggtaacaatacttttgattccttcttattagcttattataagaattgaatagaatgttgtttaccaaaagtgttttatgttaaaaatcaaaggcaacacaatttgcatcattacaatacaaattatccatacataaacttatttcacaaaaatgcattcagtccatatatctatgctggacagtgtcctgggctggaaatacagtggagaagaataaacgaggtgcaatctctgacctcaaagagtttccaattaaaagaagtgtttccagatctctcatctcttaagatctcttcttggcatctctctctgtcttaaatgtctctactataaataaattgatacaatttggcagatacattctttttaatagcaggaaatatttttattttcttccctatgacactaacaagatttcatctctctgcctaggtttacaaagttttgactattacttcaggtaataaatatcataatataggttcttagatgtgaaataaattgaaataagtacaaaactatacctctctttggcacctaatataatccaattcatagaaacgtctgtgtttttcaccaagttaagcagaaaaatactcagactatgccttcccatgattatacatcatacctgaaacctgaaaaaaatattagacagtaatccagctatttcaaagacttgaatgtttagttcctatacacaagttcctacatattctaacatttttaattttcaaatatttatcatggtccaaaaaaagaaaaaaccatcaatcagaccacgtgatgtgatggagtagccacagcactccatctgattaacccttcaggccattgattaatgcaaccaatcaagtaccagaccattacatctgattaagcactctctgattttactggcaatttaagaactccagcttaatgcttaggagggaatctaatgcattaaatctcatatatcttttttttttccaggaggaaaacttcatttggtattcagtccacactagataaatggtgatctatggagactgaactactaaagcaaataggcatgcagacaatgagtaaacagaagagaaatgtcttacaaacacatagggttttaaccagcgactttaatgttgggtcaagtgtcctttccacgagctcctttggaacacaaatgataacaaagtcaataataactatttgtacaaagtctccactccttgcaatcttgggaaagaagtattaacttgaaagaagtaataacttttgcaccaacataatacgcctttcccaggattacaaggagtggagactttgttacagtagttattattgactgtattattcagtcttcttttcagatttctgctcatctcctatgaatgtatcccaggagtagcatgaggaacatgggattctgtaggaaactgccagagacccaggaaacgtgtgaacacaggtgaaaggaaagagaggtgtgccaaggactgaggaagaagcaaagaatcctaaccctggatgtaggaaacatcaacccctggacatcagagatggtcatactcacagagagtctgtaataacctatgatacgtgaaaaaaaagaaaaatgagctagttcaccagctgtcatagatagtgcagagaatcatcatacactaagtgaaataagtttatgtatggataatttttattgtaatgatgcaaagtctgttgcctttgatttttaacataaaaaactttttctaataaaccttctattcaattcttataataagctaaggaaatgggcaaggttgaccttatcccatcttacaaatggggaaactgcatctcagtgagtctatatcataaaaaagatggctggagttcaacacagctttctaatttgcaattccatggctatttcactatacaattaagtactatggaattttaggttcttattttaatgcatttttaaaatattaaaataataaataattctttgggctgcttcccctagatgttaattttaaggaattgtttattttatttttagtctactgtataaaacctaatattcattaagtgaatatgagagagaataattgaatgaattaaaattgtaaaatataagacatattacagaattattttaaacatatttacatatgtataagctgaacactttgtgaaccccaatgctaatatatcttttccatagttataaaagaacattcaatttaagaagtggggctgggaaaattggttattcacatgcaaaagaatgaagttggatccctcctcactatatacaaatattaactataaatagatcatcttaaatataagagctaacattataaaactcttagaagaaaatatagcagtaatttttcacttaggcaaagacttcttagttgtaataattaaaagacaagtgacaaaagcaaaatagataaattggacattatcaaattaaaaacctgtagttttcaatggacatgatcaagacaacccatggagtagaaaaaactgtttgcaaattctacatcttatggaggagtttatctagcatatataaaggacttgcaattcaatgataaaagacaaataacccaattcaaatataagcacaggatctgaatgaacatttcctcaaaaaggatgtacaaacagccaataaacataagaaaatatgctcaacatcattagccatcagaaaaatgtaaattaaaatcccagtatcacttcacacccattagaatgactataatcataaagtcagataataactagtgttaataataataaagtgttggtggagaaattgagccctcatacactgcaggttggaatgtaaaatggtgcaggtgttttgaaaaacagcctgacaatttttcgaaatgttaaacataaagttaccattcagctcataggtatataaccaagagaatgaaaacatacgttcactcaataagttgtatatgaatgtaagtagtagcattatttatattaatcagaaaaaatgaaaacaaaccaaatgtctgtcagctggtgaatgggtataaatgtggtatatccatacaacggaatattatgtaacaataaaaagagagaacgtactgatacaagaaaatgcaattttactcctacacaacttctggttaccaggtaaactgctgtgaaattcattgcctatcgacatttgatgtttttgagagccttaagaaaaccacttcttacattttaatgagtcattaaatgacttttcttctttcacacacaaaatctcccattttagtttttactgttttccagtatttgagcttatgtgcccaaagtgtttttttatctaaactcatagaaatataagctgtatttcaagaatgatcattgccaatgagccacaacagaggtaaaaatatactttctaaattatcaggaagactcctacagctgattttataaggaactccctaaaatacataccaatagcttaagagatttgtcagtaaacaacaatgtcatgtgacagcaattaatcaacacaatagtaacgccttgtttgctcctgtgttcaactgtcaaaggaggccatttcatctggactattaaaactcctaaatgtggcctggtttatcaatggtaaagtgaatcagggagtttttgacgaatacaaatagaaaaaaaaatcctgtaatgtgaatttaaatgcatgtacttagaggctgtaatatataaactacagcatacagataggggttggaaagccatagtttgatggtacaagagcaaatgcttaaatgatgactgtataaaaatgctggaaactcccccagaggcaaagagtaaactggaatgtcatattgcctgccactgtacacaagagatgaagggaccagaaaataaacacaggcttcttgaaattcatcacaggatatactagtaaaggcataaaaactggaagtcaaaagtcagcagcaagataataagcattttggaaatagggtgttcagtagagagggtaaccatagccagagttgtattacagccatagcttgagctgtagtcaccaccacttatatggagccttaattacagcccagtcctgggtagcttttgctacccacatcatagccatagccaaggccacatccacagttcccatacgagtttgtgtcataattggaatacatggtgtcagcatgtaaggtttcagttgcattgtaaaggaagattgatagtctattcagagcaccatgccaagacctgcacttcacctgccaggaacaggcaggccatgtgtcatacagactctgcctcctccatacctccaacagtttgtggagcagcctttcattattttgtggtgtcctcttagaaaagatttggtcaaagcagttaagaaagtgtttaattgatctgctaacttggctttccccaactaaattttcagtctaatataagtcatttttgatgaacatacttgtcagattttattatccataactagcagcatgacacctactgtgaaggtgaaggtctcaggtgagcacctgtccacatgagagctgctataacgaacccttttgcctctcttattatcctgttattttacctaagaccataacctcaacttcttcctcattgcaatttaacgcattacatcggccaggaagctatattcccattaacacataaagccacagaggcagaattatgtctgtgtctacccgcattcaaaacaagacataattggtgattaggccacctctgctaccaaattcatagttaattcatgagaagagttaacccgtgtattaaaatctatgttctagactaggtgtggtggctcacacaggtaatctcaacactttgggaggccaaggaagggattgcttcagccccagagttcgagaccagcatgggcaacatagggagacactatctctacaaaaaatttgaaacttaaacagacgcagtagaggtgaaaggattgcctgagcctaggagtgtgaggttacagtaagctatgatcatgccactggactttagcctgggtaacaaaacaagaatctgtctctaaaaaaaattttttttaattaaaaagaaaactaaagcaaattatttttacctttgtaatatctcacctgcctaacttgttggctgttaataatattttgataatttatccatccttcatgtgatttttagtatatttctattattcaaaattcacaatctagtaaaatacgtttcatacttttcaatgtattctccaaatcccttcccttcattccttttctccttttctatggccaatcatcaaccatcttttggcaactgacccaaatacagccatacccaaatgaagaaataacataaatcataaatataatacattttaaaagtgttgttttactgagaggcagtgtaatcacagtgcagtcccaggtaaaagcatactgccaccccttactaccaagtgtattccaatttggataataaattgtatcaatgacctataatcaatgactcaagggccagcctgccttgccaggttcaaatactagctttgtcatttaccatttgtgaaatctggacaagttttacctctctgaccctcagttgcctcatttgctattagggatactaagttaagtactaaggattaaattagtatatgaaaagcattgagaacagtgtctgaaaatgacaattattattacattattaaatgtaagctgtggttattattgtatatattaaaaccaattacattcacagagagagagaagaacaacatgccctatggcctatggcacttcagaaataaaacaaatatgacacagaaaaccaactaacacagtattatttgattatatatagcgttaaggatggaaaatgttaatagggacctttgggattgtgaaacttttaggaggaaatagttattagctttgctacatattacctgaggcaaaatgtatgctaatagcccattgaaatgttaatatttagatgtgaatattagttttagtttaacagtcatggaatacaaataggatgcatttagaaaattctggggataagatagatataaacaagttactattaataagaataaggtaattttcactaagtactttatatattatttttgaaaagaaaaagtagaatactaaaaaatacttttccccaggtttatgaaagcattgtggaaagtgaaaaataaaattaattcactttccaggatctttctttacagaatggcttgataggctgcctactaatgtttctagaatcttaaatatgggaagtaaaatgattttttagtaaatcatgtattatattttagataggtttacctagttctattagcattcacataatttttcctttccgtaatggaaataagtcatcagtagaatctgtatttgagtaattaattataaaagcaatggtagatttgaaatgattaatctttatttttcccccttagaaatggcaacatgtagattaaaggtggttaacctggattagaagacaagtcatggtcatagaagacattacactcaagtcccccaaatcatggggcacacgcccacaacctcagcattattgagagagccacagacaagcatcactaattggaccagatgatttttacatcccgtactgctccaaaattctgagttctctccagcagatatttcaattaggccaaaaaaaaaatacagcaaagtaaaaatggtcacaatcattttatcagaaagttcagaaaattccaaaaaactcctaagttgatttgcaggtaccaagtgaaaaaagaagaaactttctacttccaggtagtatacagatgattaagaaagatcttccctcccataacaaccacaaaatcttggacaaaaaaaaaaatcacacttctccatgggcctaataaagaacagtagatgatgtaaagaatcctagttgaaccgaattcgagaaagaaataaaccttaaaagaggaagccatgggagcttttattgctgaaggcagatgtccactttggatacaggcagatcaaatataaagagagaatttaagaataattattacatatttcaaatatgaaaaagaagccagtctctttcactactttcgctcttttgagagtctgatttcacctcaactcctcaacgtccttgtgttctgatttccgtggctaaagccagcttaacacctccgaatgggtactgttaagctacaagggaagaaaacacattccaattcaatcatccaacacatgaacatcacaatctcttttattcagagccagtactaccttcttttaatctacagctgacatcactatgatactttgctctagaggctgtaactgacaacatataaaatgtaatagcagccaggtagagcattacagttcttgaaatgaaaggagatttgccataatagaaattcaattgccatatgctgcatcagctataagtagcatgttggaacacagcatgctgtgtttcaaaacacaccttatcttaacactcaacacctgaggcaaaggcgcattcaaaatgtatgtctttgcagagagacaagtaataaaacagcatcttacattttatagtgttttacagtttgcaaagtgttttcatgtatataatctagtatggcaataaaaaattatgaattctgtcttacagaaaagaaaaccaaggtttagagacactaaattacttgcagatggttactgaaattgtaaatagagggacaaattgcgctaaagtttccttgttctaaatatagggctctttctacagtcgcacaagaccacattctttcaaatagttaatatcatagaaaagacatgctgaattatataatcaaaacttctggtttttcattatggctgtatagtaaccacatgcatcaataaactcaagtatacattcattcgtgcaataaatattaattgaatatctttcatgggttaagtcctgggaatgtaaaatagtccttgccctcaagaatcatgcatttgacaataaacatgtaagtaatcaattccaagatactgtaacaaggagaacacagagactggcactaagggaagcttgaagtttctaggaagttccaagaggatgagtaaaacttcatgagacaaagaatcaaggaaaatattccaaggagaaagaaaaagggtatgagggtgaaaatacggaaaggcatgatagagttagggtgcagcaggtattttgacaccaagtgcccggaattctgtctttggacgactttgcctttctgtctgcattcacttagtgatatcatctggtctcatgaatttaagtacttatatatgttgctggcaactaccaaatttgtaactctggcccaggtgccttccaagactcatgtccatctgcctgatcgacatctccagttggattcttgatgagcatctcgaacataaaagcttcaaaattgatctcctcattttgcccctcagatgcactttttttttctttttttgagacagtgtctcattttgtcacccaggctggagtgcagcggctcactgcaacttccacctcccaggttcaaatgattttcctgcctcagcctcccgaatagctgggactacagacatgcaccaccatgcctggctaatttttgtatttttagtagagacagggatttcaccagttagccaggctggtctcgaactccagacctcaggtgatccgcccgcctcggcctcccaacgtgctgggtttacaggcctgagctacagcacctggcccacagatgcacgtcttttgcagtttgttttacttccatttaagactgtcctatcttttctgtcattcagcctaaatcttggaatcacccttaacacttcacttatgtttatacctcacaccctatcattcagcaaaactagtaaactctacctttgaaatagctcatcattttgattgccatcaccagcagctaattgcaaatggcttttagctggcctttctgcttctactcttgtccattcctgctccccagcaggataatatcaacatactacccagagagagcttgttaagacagaagccagactgtgtcactcctctgctccagaccctgcaaaagaatctcatctagaataaaagctaaaacttttaacttaggttctctgacctcatctcctgccacctacttatccaccaccttccctgcctgctagccacactgcatctttcttcttctatacaaaatagagtccagccattgcactcgctgttcactctgcccccaatgttttcccctgataaacataagtcacactttatcctccttcaaggttcgcttcagtgccgtattctcaaagagaacttcattgatcatcttatttaaattttagcacccttcctggtgctccctatcacacttcgtttctttttctccaaagcccttttcatcattagacattaaatttattatttgtttaagctctccaaagctaaatgtaaattccaaacatgctgtgatttttgtctagaatagtaatcagcagagagtacattcttgaaacttatttgttaaatgaatgaatttagttggtcaacgtggtgtacggcaaagtttcacaagggatgaaatgtgaaagctaagccatattcacaaaatgatgtgatttacatatggggtgttcatccttcctggtttaccagagacagtttctgttgttctcttgtaagtactcaattaatagagtttccacggccgaggcgggcagatcacgaggtcagatcaagaccatcctggccaacatggtgaaaccctgtctttactaaaaatacaaaaattagctgggcgtggtggtgtgtgcctgtaatcccagatactcgggaggctgaagcaggagaatagcttgaaccagggagtcggaggttgcagtgagctgagatcgtgccaccacactccagcctggtgacagagcgagactccatctcaaaaaaataaataaataaataaaaagggcttccataaactgtccaaaacatatagttaccctatgtatatggtatgctaggaaatttggactctttctcacaagcagtgggaagccatcagaagcacaggtgaatggcataagtgagtacgtgttttgaaaagataattctgtatcaacaaaaccaatgaaactgaatggagagggattggtgattgggaaaatggttagaaagccaataaataacttgtacggtggagagtattccaaactatgtgacagacagtgaacattgagatgaagtggacattttgagatggacaaatggaaaaactgtcagcagaatttgggaattaataccattaaggagatatcataggtcaaggctggttgtacgatttttagcccgagtgatggtgcagatcaggaagttgtttatccaaagtcatggacacaagaaaatgatcaagattgagaaagaaaatgttaaacccagctgagatataagtttgaggcatatctgtgtacacttagaagacagttcagcaaataaagaagcaaaacaatctgaatagagaaaataaatttaatgtcagaaaagagagatttaggacttatcagtgcatatttgagagtttaaaacatcttggtctatgtcctattgcatacattaagtgattttaatgaagacaaaaaaacttgcacatttacattcagttaatcactattatatactggaggtaagatactgttatgcatttttgggacatttatccagcctcatatgagtaatatcttcaacagtcttttccaaatgaatattggatactgccaatccattttaaaactctgtttaaataccttttacttgtatatgtttaaggtgtaaaacttgatgattatacacacacactttgaaataattactacaagcaagttatttaacatatatattaccttgcctagttatttggtggggctggcacctaagaagacttagaattgccctcaataaatttcaagtatataggacagtgttgttacctgtgataagcattagatctccagaactcatttatcttactatcttacataactgagactttgtaccccgttcactaacatccttccatatacctcttccctctcgcctggtaacacctttctactctctgcttctatgagtttaactatttttgattccacatataaatgagattatgcagtattcctttttgtgcctggattatttcttttaggaaaatgtcctctaggtccattcatgttctcatgagtggaagggtctcctttttcagctaaatactattccattttatgcatatactgcattttctgtatctctttatctgtagatggatatgtagcttgtttctgtattttgactatggtgaataatgctgcaatgacattggagtgtaaatgtcctttgggattctgatttcaattcctttggattcatacccagaagtaggatttctgagttgcatggtagctctgtttttaatttttttagaaacttccatagtattttccataatggcagtaccaatctgcatccccatcaacagtgtaaaagggttcccttttcttcatatttttgccaatgcttgttatctttcaatttttcaaatatagtcctcctaacaggtgtaaggcgatatctaattatggttttaatttgttattttcctgaagattaataaagttgagtattttgtcatatacctgtcggtcatctgtgtgtcttctttggaaaaatagccattcaggtcctttgcacattttgtaatcaagttatttgatactttttgctattaagttgtaagagttccctattatatatttttaatattaacaccttatcagatatttgatttataaatattttctctcatttcataggttactttttaccttgttggttgcttcctttgctatgcagaagcttttaaatttgatgtagccccacttatttatttttgcttttgttgcctgtgtttttggtgtcatatcctcaaatctgctgtcaagaccaatgtcaagaagattttcccctatgttttattctaggagttttacagtttcaggttttacatttaagtctttaaaccatttttagtagattttttatatgatgtaagataagggtccagtttcattattttgcatgtggttatccagtttccccaacaacatttattaaagagactatcttttccctaccatgtattcttgggacgcttgttgaacattagttgaccgtatatgaatgggcttatttctagactctcttttgtaacgttggtatatgtgtctgcgggtaaagggaaactgttcctgcttcccctctttgatgcacctatccttggatttttctggaatctctccatctctccactgaactccttggttcccagggaagtattcctgcccaagcatggttgtgaaaattgttgtttctgtggagggttgagggatggaatctcttactctaccatcttgcttacatcctgccaatgcatattttatttgggcacaaattctccttcttgaagacatttgattattcttttttagctcatttggttcatccttaacatgtttgtattagatttaaattagcataatggcatatagtaaaatctactgtaaaaaaaagtaagcaatattgcttacagagtcactaaactgaacacctgcaaaactaagtaaatattcactgccaatccatgttagtgagaagctaagtacttttctgctagctctgacaaagtaccgtactggagattatgcactgccaccaagttattaagcttctcttcctctctaacagaacctaaggaaaaagcctttcctctccaacttccgacttgaagatgtggtcactggcattgatgcccttgtgctgaagtgatctcataaattgaaacttaagatgatgctttctgaatgtttttagagatgaacttaacatttctgtcctcacgtttatattaaattaattcataacatctttgttattttaaaatataggttttgttactatttagagacggttaggacaatagatcaggagacaatggccactgaaaagacagtttgttatccacatggatcccaagatgaggaggcatgccacacccaagggagttacctagaggagggctagagtcaatcaaaaagcagaggcagaagaggaaaacgtgaaaaagaaccttcgctgtggcttctgtgcgaggcagggtaagcagggattggcaagtttggatcatttcagtgggctctggggcataggcgctgtccctacttgtctggggcctggcccaggggttatttgagcaggtggataatggcccagagtgtgagaccccaataaaggaggtggctgggggtgtgcattctgaattggctgctttgcatttgaaacgtacactcactggtggtttgtttactacctctagaaactggctaacttggccaggcgctgtggctcacgcctgtaatcccagcattttgggaggccgaagtgggtggatcacgaggtcaggagatcaagaccatcctggctaaccccgtctctactaaaaatataaaaaattagccaggcgtggtggcgggtgcctgtagtcccagctactcgggaggctgaggcaggagaatggcgtgaacccgggaggcggagcttgcagtgagccgagatcgcaccactgcactccagcctgggcaacagagcgagactccatctccaaaaaaaaaaaaaaaaaaaaaaagaaattggctaactttgaaggggcagtccctccaaggtcaacaaggctcacatgtcaaagcaccagaatacagaaaataaaagacacggttaatacatttacatgtacttgttgcttcattcaattactaacaaaaatttgtctttcaacattgagtggtgatggagcaacattcttgactttcaaggtaaattatttataaagcatctatacctcagtttcattgcatgcacactaaactgagcatctcctctagaagaaaatgacaggaagcagatataatgaaagaaatacatccatgaatttggttactttagtagcagattccagcaagtgaattaaaaatctgcaagcaatcggatatcctgttatgttggtattatctacaaagcgcaatattaatattttaaagcaccatttaacatgttataaatgttatatattataaatgctatatgcataaacgcacttacatttaaaaatgctccatcttatttggagcatcttagataagcacatagcaaagaatctccaaaattctctttatgtcatatcgtttgttcttggccaaagaataaaatgatttttaattagctcgctatttctctgattatggacaataattctgttattctactagtgctgtaattatgccctgaacacaaaactgaagaatgagaagagaaatcataatgcacataattaccaaatgactcatggcctccatcatctttcctccattgtcacttgcaattgcaatcacttttccttgctgagtttcctttctgcaaatatatgttgccaccagattcacaatgttgctcatcatgtgagttgtagagatttatcagcaaaggagtaaataaaatcatgataagtttcatcattaactcagcattttatcaaattaaaaaaaattttattgtttctgtatgtatgcaatatacactgttcctaatgtacacaatacaggaatagcatatttagttatattgttaatcctttggcaaacagaatataattcaggaaaaaaaatttaagtaaaattaaaatataaatatactctagaagaaaatctgtgcttcagggtcatacctaaggaaatctcctgagagcttgttggaaaagaggaatctcaggctccagtccagatccagtgaatccaatttggtttttaacaaaaacctgatttgaacataatttgaatccaccttaaagttcgtgaaacattgatttagatagcataagctctcctaatagttggatcactcctcaatgtaggcatctctttaaatacgtatctgttcttaataattttaattcaaaaatcacagttgtcactaattactgtggcatatttctcttatgatcatgaatactccaattagcagattagcatttcaatatataaaagcatgaacacccggacgcggtggctcacgcctgtaatcccagcactttggggaggccgaggcggacggatcacaagttcaggagatcgagaccatcctggctaacacggtgaaaccccgactctactaaaaatacaaacaaaattagccgggcgtggtggcgggagcctgtagtcccagctactcgggaggttgaggcaggagaatggcatgaacccgggaggtggagcttgcagtgagccgagatagcgccactgcactccagcctgggcgatagagccagactctgtctcaaaaaaaaaaaaaaaaaaaaaccatgaacagtccaatttacctttggactgcttgtttatatttgaaagtgaatgttcagataataactataaattgtaacaacattctttgtaaaactgacattgtcacactgcttggaaccatcatatgaccaggaataatgaaaagatcagagatatcaagaataagattggagttgacatgaggtccttcagaattccagaagctgaagccaaagtaaatgttaaatttattctgtgtatacctagtcaatacattatcttcctttttctgttaatttttatcataaaacagagcatctgcttatgtaagagtgcagaataacatgttcccaaagtacaatctagaaaacgctgcagctttcggccaggaagaattccgtcatccagatacagatatgtccttttttttctgtgaaattcgtaagtataaacttaacaatgattcaccattaaataaaattacgaatctatggccattctcataattgtttctgcctattagtcatacctctctagggcattatgagatgcccaaaaataaatgggtttattcgaatatattttgttcaaaactactggtaaaaacaaccttaaactacatagttgccaattttatggggagtagggtggtgcctgttttgtctaattctgtctccttgagcagggtctaaattagagggtaataggactacttaatagtcaattgatgagtctcaacaaagttttttttggcattatcttagtcaatttggcccgctataacaaagtaccatacactgggtgacttatgactaatagaaatttatctctcacagttctcgaggctgaaaatctgagatcagggtgccagcatggttgggttccggtgtggacccccttccggagtgtggaccacagtcttcccattgtatcttcacacagtggaaagagggtatgacttctctagagtcccttttataaaggcaacaatctcattcatgagagcttcaccatcttgacctaatcacctcccaaaggaggtcccatctcctaatatcaccacattgggggttaagatttcaacatataagttctgtggggatacaaatatttagtccattgcaggcagaattctcagaaattatgtagccatatactgaataaataggtaatgggttattttgccaactttactttcaacgaaattgaatgataattgcatttcaattaatagatcatttaaaataattttgttgttagataattatttacttttggcttacacctcaggagaggtcaaacaatcaagcacaattgctgtaacaaaaattcctccattttgtctgcttacctgtagaaacaaggccgccgatgttttctatctagagatctaaagctaggagtaggactgatgctgaaatttatctcattctagcaaagaatagttgttcaagaatctgtgaaatagtaaattttaaataaaaagctatctatttttgtctcatcattgagctatatatcaatttttattaatattttagtaactattgtatttgtaatatttttatgacactctgatgcatgatgcattatgctacattttatcgaatctaaactccaccaaatgtgtagcatgcaattattttattcaccattaaggaaattcaatggtacacattaggcctttagatttgtttgtcccccatatcctctactttatacctctgacctacttctccccatttcctctatccctcttctgtggtaacaattaatgaggaatatagctaataaaattgtactgtacttggaatttctgctaaatgattagattttagttgttcttgccaccaaaaaaaaggatatttttgtcagatgatggctatgttaatttgcttcactgtagtaccattttactctctccatgtatcccataacattacattgtatacctcaaatacacacaataaaatttttaaaaaagaaaatgcagtggcacacatcacttgttaaatgcacacaatttccaaaatattaaaatgtgaaaacatatgcacctaaatatcaatgaaatgtagtaataattatgataactgctatgggctgaattgtgtctcctgccaaaattcacatgttaaaggcttaaccctcaatactattatcattggagagaggccctgtaatgaggtaattagggttaaatgaggccataaagacaaacgtgggggcccagatttcatagaatactgggttgtgctctctctcgctctgtctctctctccctttgccatgtggggacacagcaagaagatggccatctacaagccaagataagaggtctcagaatgaaacctaccttgccagcaccttgatcttggacttcccagcctccagaatggtaagaaataaatttctgttgtttaagccaccgagcctgtgaaattttgttacggtagccttagctgactgaacaacaatctaatccaaaaggacaattttaagacatagctttgtgggaacaggaaataaaatttattaataaataaagttgtatggaaaaatacattataaatttataattgtatctttatgtgaatatttttgagaagatgcacgatagagtagttaataaaatacttataaaaatatatttcattagtaaaatactctatgggaaaaggacaatggaaagataagttcaaggaagaaaaaagatgcagatttcttttaagatcttaaggatttttcaatgaatagtagtgcacagcaaatggctattatacttacattttactggtagatttttaaagtatggtaataattttattttaaagtgacaatattgatacggtttggctcagtccccaaccaaatctcatactgaattataatccccagtgttggaggtgggaacaagtgggaggcgatgggaccttccctttcactctctcttccccgttccccttccatataaaccacacttgcttcccagtagccttccagcatgatagtaagtttcccgaggcctcccctgaaacagcagcctgtgtagcctgcagaactctgagccagtataaactcttttctttataaagtgcccagctgctagttttttatagcagtgagacagcggactgatgccgacatttgaaatatgccagaaattatattctttgcatctaattaaatattaatttcatattttagatactatcttaaagaaataagagaaggcatttatgagaagggtagatattattagtgttcaccaatctcatattctcttattgtaggcacccaaatgccttgtatttgatagggccatttgacaaattctggccagttatatataagggaaagagatgtgtgcgtctttcaaacagcgttagtgattctctagtttctctttcttccaccgaagacaaaggaagtcagtctttttgcagatgatgctgccagtacatgatgggtctccagcccccgggattcctaagtcactttttaacaacacacctctgacatcctgcaatgggcatgttacattaatatgtaataaattcatgttgggagaagccactgaaattttaaggttgtcggttacctcagatgaacttagcctgggctgatgcagaaggggaatccgtgaggaaaaggaaatgaggaccatcatgatcatggaactctggggaagagaaaatttttaaagctgtttccatgtgttttacagaggaaaaagtgacatgaggtatgagaaatagttaatgaatctgataaattggaatttctttgatgatcttacagaaaaaggttttcagggaagtgttgaaggttgattcagttgctataaattgaagagggagtaggaagtgaggcagtggcagtgtgaaatgccatttcaagattgtggctctgaagggagaagtcgagggagaaatttaaaagggagatgacatactaaaaaatattttctagaaaattgagtgtccgtctggcctgaaataactcatatatatgcaatttgtgtaaatcccaatgtacttgtagtccaaattacaaataataccgagtaatgcacaatcttttatttctcaccaaatctttaatgtgtctttgtttctcttctcgactaaatcagcttctagagagagaacaaaggcaaaaatcgtattcatgtatttgtctcacagcaactacaagtaactggtatttagtagaagcctgataaatttgattcattgactaattaatcataatctgtaacaatgtcttgaaaattaaatataataatataaagattgtggtttatatatgcttttcttatgaagattaattaatagcatataaataccataaattttataagtaacattattcttattacccccaaaattaacaggatgtactaaaaggcctttatgtaatagatataattataacctctaaatgcacatggtttttccattaatcaattatgtcatctgtaaacattcaggaccaagtcagaaaatatcatctgaaatgaacaattatctggctgctacccatagcccacttgatgctacattttaggacaagcaagtatatgttattcatttattcctccagttactccacagttgaaacaagctgaaaaataagaaggctaataaggacttcactcttttgccattgatagtcactgaatataagaaatatactattacagacaatgaatgtgttcagtgttctggagaatttctactaatatttaatctctggattcaaaggagaggtgttatattatctcagggcacagggatgctcctctctggacaccatgtatgtcaaaatactttggtgcttcaacggtgataaaatggagaggactctgaaagagtgacaatcctgtcctaaaactaaaatctgtacacaaatttgaatatctttagagaatataaaataaatctgcccaaatatgaatctctaaaaatcaaaacaataaataagtcaaagagagggtaattcaggaaagaagtaagcaaacacttctgataaactattcgggatccagcacttagatataaactcgggacccaaattgaataaagaatgaaaaaatatataacaatcacagcaatacaacaaagtacacccaaaaaatcagaaaggagaatcagctattgctatgctaaggaaaaggtacttatttttaaaactcaacatagaaaaacagctcccaactttaactgaagttaaatatgtgatgtcacccaagcataatattacatgaaaagaagaaatagatccctaaagggagagtatctgaggaacttcaataaaagtcattcaatccattttgaggtaaagtcagttcaatgctagcatttggattcccaggtacaacaaagaatagagacattagttaccaaaaaataatataataactggagctgagatgtgagctgagcaagtggatgagctgatgggtcatggtgatcaaggtgtagaagtccccaggtaaaaaatggtagagtgcagatggccaatatcttcctcagcaagctgggcttctacattatcagccaaaagcagaaacacatccacagctatatccaagtcattggaaacatctacattcgcacccatacccatagccagagccacagctgcaacccagtctccagagagaccatattcaaatgagtccaaaagttgagaagatcctgaggggtaccagccagaatagcaattattataatgcatcaaatgagaacgaaggatgccctctaatatccaaaatcaagtaatcaaagttaaacaacactatcatttcagggtcattcctatctacctagcagtgggtggaatgctacaaataaattctgtatcttattattttattaactgatttaaaggaaatgataaatctcattatcttttgtcctcttatatgagtagagcctttgaaatgggctcaacagtactacaacttaacctcaaagcatatttagttttctttaatgagtacaatcgacagtctataataagtagtgaaaaatcttttctttttagccccagatttaaagctatgtacctagactgtgttctactctgctcaaacacactgaaatttctttgccttctaataaaatctcaaaacctgtgatgaggtgaaccttccccagaaactagaagtttctgaacaaatctcacttgagatagaaaagactcactcgcttagaatgttgctgacacacacctgccacttgtcatttaccatgaagctgaactgccagcagggtatgtccaaatgtagcaattgcccacaagtattatccagagatattagcagactccagcaaggtaaataccaacattaactaacactgccttgtcctgaaaccacaggatgtgtttctctttaaaaagcatccagctaacaaatagcttcacttgctttttcaaagtgtgcaggtgttttaatgaatatctgtattcagtagggatcatgttaaatttaaaaactgctagtctctgaattgattaacaacccatgtatagacaccaaagccctgcacaagagcccaaatacaaacatgaaaaccctgctcaagaggcacatctgaaaatgaaggatagtccacactttaatctacaatataaacaaaccttatctacttcatagtcctctggtctggactttaaacctacaaaacttccattccagctccagagttctactttcctagttgctttaatattatgtcaagaaccaccaagtgctgatatatttatgaagaaccaccaaagtgctagtacaatcaatgatattctccagaattcccgtgcaaacataagataaactattgggctatcataaataaaagttcaaaaagtgaatagaaatcattaaaaatgtattaataaattcaataaaaagaaaagccatgttgttttcaaggcaaagttagagccaatggtaatttttagcattatattcactaacaaaacatatgtaatatgtaatatgaaaacccaggtacattacagaagtggctgtcaaaattagggttagaactgcattaaagcttgttagtattcaaagagccattaaaaacaagatttgagtcaaaaaataactcagggtggattaaagatgtaaatctaagacctgaaatcatacaaattctagaaaaaaaacttaggaaaaacttttctggacattggcctagacaaagaatttaggactaagatcccaaaagcaaatgcaacaaaaatgaagataaataaatgggaccaaattaaacaaaaagcttctgcactacaaaagaaataataaaaaaatattaaacagacaacctacagaataggagaaagagattggtgtaaaagtaattgcagtttttgctatttaaaagtaatggcaaaagccacaattacttttgtaccaacccaatacttgcaagctacagttccaacaaaggaaactaatatacagattctacaagggactaaaacaaatcagcaaggaaaaaatagcaatcccaataaaaagtgagcaaatcacatgaatagacatttctcaaaagaagatatacaagtggccaacaaacatatgaaaaaatattcaacttcattaatcatcagggaaatacaaaatagaatcatgatgagataccaccttaccccagccagaacggtcatgattaaaaagtttaaaaaaaatagatgttagtgtgaatgtggtgaaaagggaatgcttatacactgctggtgggaatgtaaattaatacaaccactatggaaaatggtatggcgatttctcaaagagctaaaagtagatttaccatttgatccaacaatcccattggtagtttgctgggtaactgccaaaaggaaaataattcattatatcaaaaagttgcctgcgcatgcatagttactgcagcacaattcacaggtgcaaaggtatgaaatcaacctaagtgcccattcaccaatgagtgaataaagaaaaccccatatacacattccatagtgtatatatacaggatggactaatactcagccataaaaaaatgaaataatgtattttacagcaacttcgatggaattggaggccattatcctaagtgaagtaacttaggaatggaaaaccaaataccgcatatcctcacttacaagtcagagctaagctatgggtccgcaaaggcatgcagagggtataacggatgctgcagactcagaaggcgggatggtgggagggctgaagggaaaaaattaccaattgggtacaatgtatatatacaccatggaatgtgcatatgagattttctttattcactcattggtgaatgggcacttaggttgatttcatacctttgcacctgtgaaagtaatgggtacaatgcacgctatctcggtgatagatataccaaaaacccagacttcaccactgcacaattcatccatgtaaccacacaccacctgtactcctaaagctattgaaattaaaaagaaagaactgttttgagacaggatttataggattacaagaaacattttggcaagtatctgaatgtgatcttcctcaacactgtcgtgggtttcctctttgctctcttgcccaaccctgactcttgtcaaccattagtgaaaaatatttattgccgctcacttcccatgtggcagtgtttaacctgtatgtcatgttacccaaagggttggtgtcaccattttactgatggacaaaacaatgtttagctcaaccagccagtcaatttagaggaaaggtcactaccatttgattaccttttcttctcaccctgctggcaattgcagtgtttttatttttttccttcagttgagctgtgatatgggtcatgaagagtggcaagaatcttaggagaaacagaattttaaaaaatagattttcagaatatgtattagtttttaaaacaaaacacaaatatattcataaatgtgatattctacaggaaaatctatatattattcatggaaatctatatccttaatggtctattgagtggtaaaatttatctgaaaatttatttctaagccagttcctatataataagaatagtaaaagtttctgctagagtgtaggggagaaactatggacacaaagacctagagatcaaaatggtattagatatctcaaaagcaaaaatgaaagccagaaaaaaaaagggggcaagtttttcaataaaatgaaagaaaattatttctaacctagaaatccagtcagtctataaactgtcaggttaaaataaaaatatttttagacatgcgggatctcagaaagtttacctgaagagttactagttcagacaaatgctataggatgtgctccaccagaaattaacaaatacaaacacaaattcaggcagcggatgatattaaatggagtggcaaagaggatttgaggcagggcgcagtggctcacgcctgtaatctcagcactttgggaggccaaggcgggtggattacttaaggtcagaagttctagaccagcctgatcaacatggctgaaacccgtctctactaaaattacaaaaattagccaggcgtggtggtgggcacctgtgatcccagctactcaggaggctgaggcaggagaattgcttgaatccaggaggcagaggctacagtgagctgagatcgcgtcactgcactccagcctgggcgacagagagagatcctggctcaaataaacaaataaataaataaacaaagaggatctatgctatgcagccagcctaaagggcagcaaacctgattggacagggcacaaaaggacagtgagctccaaaaagaatatttctagcgcagagatggaaccagtggattttccaatgtgtataatcctacagtgagaattttacaattctgtcaatgaatttaaagatggtttcttggtggaaaacttaggcagttattaattcatggaaaggaaatgctataccaatgcaccaaggatttggggtaagtatgtgaatacttgttatatagccctggctggtctcaaactataccaatactacagtatatacacagtaaagactactgtgatattaccatatgggagattgtgagagggaaactgcatgtgtcttgggtgaagcgtatgttttttaaaatcctcatttcacaaaataggaagttagtaaattatgtgcaaaattgaggaaacaaaaagtacagaataagactattatggacaaatgattaagtatggaaaaagtctaaaatacttgaaggtgggttactactgcacagaataaatcaaaggtaagaagcctctatttttgttgtctgcttttttgtagaagttacttttgaatcatccatttaatacttttattatttttaatgttaattaatactttttgaagataattttaactagaaataaatgctataaaacagggtaatgaagacggggcctcggaaaggtatcttcagaatccattaggacatggtatgaaagaagaaggttattttaattgcaatggcctagcattgaagaataacatgtgttccgaaccttaaaaatacttctgacatttgatttagtatcctggctctaactggagtctaaaataagcaaataatcaaagatggggttactgattacttagtaaatgttcattaaaatattactttaaatgataaagaattgaaagcatcctaaatatataaaaattgagttaatattaataaaacatgctgcatttatacagaataatatggtgcagtcattttgaaataatatataattacataggggagtattcaaaataatcacattacaaagaatacaaaaattagtttttctatattttataattattattttactaaagaaataatactagttactcctaagtagtgaataatgtgtatgttttttctaactttgttttccatactgtttgcaatgagcaattatggatagaaaaaaacaatgaatgtttttatttttctaccaaagtaactcagagtccaaattcctgtaatcttttcttatggagctaaatttctttttttaaatagtttctaatgtttttctctagaatattccttaattttctatattcttaataaaattcagatgataaaatagaatcaatattctcataagagtttgaatgatgctatacagtggaagaattatcacctcccatatgtcctacttgtattaactcccatatgtaccagggtttttttaaaattatacatcatgttgctgattcatccctagtgtgcaatggtttggtttctgaaatatttccccaagccagtgtttctccattctttaccgggccctgcctcttacttgttcctctcatgccaactttcacttttgctgattgccttgtttaggtagccttcaaaatctatttctaaccttcaaggtttgggaataccacttggtctcacaacactggaaaaatgtggtcaggtgcagtggttcatgccaataatctcagcattttgggaggccaaggtgggaggatcacttgaggccaggagtttgagaccagccagggctatacaacaagacagcctctacaaaaaataaaaaaaataaaaatatatccaggggtggtggtgtgcacctgcagtcccagcttctctggagactgagtgaggaggattgcctgagcccaggagttagaggatgcagtgagctatgatcgtaccactgcacttcagcctgggtgagagagcaagcctgcctcaaaaaaaaaaaaaaaaaaaagaataaaaaaggcaactgtgtgatgagcatgtctatttctttgtctagatcaatgaatctcaaaaggtaattcaaacatcactcattttggaatcatcttgtactatagtaattaaaaatgcagataaataggctgcaccccccagactactgaaccagaacctatggagggagaactctggagtgtttattctttaaaagcgtggctagaattcttacacatgctcaaatttgagaaacacagaatccaggttattataaaataaacttcacatatttttacatatgtgccaaattgataagctactttcagaagctgctagattctctatccccacacttctctttcaattacagactaatcattctagaagtttatccctactccagattctggaagaagttctgctcttaccctatttgcagagacagattcaagaaggtttgcaaaccctatataggacaaacccagagaaatctatttcaaagcattatatactgtatcattgtacttatatcaccttgtcaaaaagacaaaaactatagtgatcgagaacagatcaatcacttttcagagttagggaagaaagtattactaaaatggaataggacgacagagtttgtttgtttttttttctggcgggggatggggagggtgatgatagaattgttctacattctgattgttatggtagttacacagatatacttaaaaacatattaaactatacaacttcactgtgttgattttttaatttaaatcttattttatacagaattttcacaaagatataaaaattcttcatttatttagatgttctagatcatattcttggataaagttacatttttcagagagctttatatctacattacattgttttactacgtccacaaatgtcttgtaatagattttgctttgatattgcccaataggctggcatcgaaataaattataaaaactagacattagaaacgtattattatgttaattctggcagtgttaagatgatatttaatgatgatgataatgatgataatttctaaaaagaagattatttcacaagaacagctaattggatgagaggctgtgagagcacaaagttagggagatggggaatataagtgttattctggggactacagcgcttccagggtttgactacctgaagaagtgaattcctctgccatttgtcttccatatctatttttaaggtgtcaagtttgctgattcaggaataagccaaatgtgaagtgtgaagtgtgatttgccataatgaaattcacctttcttgaccttttctatttaaaataatttaaaatgtatttttgtcttccttcatgcagcaaattgagaatactcaagagaatacatttttctcagctttgtgtgtgaggcaaataccaccctggtatcactgagatttcttttaactcacaactttctccttttgttattaatggtttcaccactaaagtcatacagaacactcaagaaataagccacataaacataaaatacaccaaaaccagaatatgatagacatagaagcctttatttatttatttatttatttatttatttatttatttatttatttttgagctagggtctcactctgttgcttaggctggggtgcagtggtgcagtcatggctcactgcaaccttgaccccctgggctcaagcgattcttctacctcagcctcctgagtatctgggactacaggcaccctccaccacattcagccaattttttaactttttgtagagacaggttctcactatgtggctcaagcaggtctcaaatttccaagctcaagggatcctccctccccagcttcccaaagcactgggattatagacataagctactgtatctggcatttttaaattttttgttgtctaagtttaaggtgtacatgatgatgttttgatatacatgtagacagtgaaatgattaccacagtcaaaccacttaatatatccatcatcttacatagtaacgtttgtgtgtgtatatatttgtatgtggtaaagcatcaaaaatctactctattagcaaatgttcagtgtataatacaatcttatgaactatagttcacaggttgtacattagttctctaggattatctatcatacataactagaaatttgcatcttttgacctatatctccccatttctttcccttctattcccctggtaaccactctctgtttctccatgagatcatgcaatatttttcttcctttgtctggcttatttcacttagcataaatgccttccaggttcattcaagttgtcataaatggcagtgtgaggaggattataaattttaacatagcttctgtgcattgattcttctatttggcattataaacattgaaccagaataaagacaacaggaaaccaaaaagtattcttcaaaagctaaaactttattgagttgcataacatgttggagatccaagcagttaggtctaattttaacccccagatttcttactcaagagtataatatgaataagaagaatgaaagaagagcatcatgcaaattcaccatggcctatttacttcttccttacaacatccatttagtggatggaatgcttagaatagcaaaccattaacttcctgcaaactgcagtaggaaaatatatccttaaagaatgaatcaagaggaaagaaaaaaagtgaaaatcacatttatatggctgagttaagcatatttattataatatggaagtcggtaaaataaaattcacctaaagttagggggaaatcaaatccactgggggaatgtaaaatacagtacagtattctatcgggaaaaactaaaacttctattaaagttcagcccacaaagttcattatcagtctactttgcacagttcaatacagagagaatctaaaattcacattttatcacctggaaggctgtcaataaaacatctcttcaagtttgattccttaggacactgattataatacagttccctttgtcagaacttaatagaggtctagtgtccaatatcttctgtcatcaagtggccagaagccagcatagccatatccaaagtccccaccccctggtgaacaggtgctaacacatccacagccaacaccatctcaggggagaaccacaactgccctagtaggagccaggggagatgtatcattgaagaggccaaaggacttcttgttagttgggtgtttagtacaaagactactaagaatgacttactccatctgcccgaagtttttcatacacccccagtaaagggtgtggcatccgcattgctcttaaaattgtttgaggttgactgactgcctagtgtccttttaatgagtttagtccctacaatgagaagctacagaaatgctaccaaagtctttggtaaaagcagattcccagtttatccatcaaaaatcaggcttctaaacaactagaaacattcttactatattgcctaacattgcttgtgagattacagacaatttggaggcacacaaaagggattattaatactatctaaactatgaggttaaatatatgcagatttttctcctaagaaattttgatatgtgattgagcaaactacggctgctttcaaaactaatgcaaatcttctgttaatcatattctatgtcatccacaagtatttctttcttactgagaatttattccacaatttaactgtaatttattttttgtttggtgattgttttatatttttatcaattataagaaaatatattttatacttaagagtatttaatacattttcaagaatagccactactttcactaactttttttttttttttgagacggagtcttgctctgtcacccaggctggagtgcagtggagcaatctcggctcactgcaagctctgcctcccgggttcacaccattctcctgcctcagcctcccaagtagctgggactacaggtgcccaccaccatgcctggctaatttttttgtatttttagtagagatagggtttcattgtggtagccaggatggtctcaatctcctgacctcgtgatccacctgcctcggcctcccaaagtgctgggcttacactacactactttcactaactttttaattaattttcagtttcttcaatgttcctcttttgtcatggaattatgaaccatgtttaggctctaactttattaaataacattgatgttaaggtctaccaggtatgggaaaataagtaataagaatagtggagtgtttcacagaatcagccacatcagataaaatgtaagtgtagtttccttcagtaatcaactctcaagaaacatgactttgtggaggaatctcttactcttccagtttccatcctatatctgactaactacagtcctataaccagaaagagaaaagcacatcagaaatatgcacattagcctttcaacagaaacttaaagaatctgtgaacacattctacatcttacttatattaaacattaagccaactaattttcactactttaactgttccctaagatatgatcaatattattgggaaaaggcccagtgaaatgacacaaataggaaaaaaaactcccagcatcaaagtcaaaatttaatacaaaatacaaaaattaactcaagatggattaaagacttacatgtaagacctaaccccataaaaaccttagaagaaaacctaggcaataccactcagtacataggcatgggcaaagacttcacgactataacaccaaaagcaatggcaacaaaagccaaaattaacaaatgggatctaattaaactaaagagcttctgcacagcaaaagaaactatcaccagagtgaacaggcaacttatagaatgggagaaaatctttgcaatctacccatctgacaaagggctaatatccagaatctacaaagaacttaaaaaaaatttacaagaaaaaaaacaaccccatcaaaaagtgggaaaaggatatgaacagacacttctcaaaagaaaacatttatgcagccaacagacacatgaaaaaatgctcatcatcactggccatcagagaaatgcaaatcaaaaccacaatgagataccatctcacaccagttagaatggcgatcattaaaaagtcaggaatcaacaggtgctggagaggatgtggagaataggaacatttttgcactgttggtgggactgtaaactagttcaaccattgtggaaaacagtgtggcgattcctcaaggatctagaactagaaataccatttgacccagccatcccattactgggtatatacccaaaggattataaatcatgctgctataaagacacatgcacatgtatgtttattgcggcactattcaaaatagcaaagacttggaaccaacacaaatgtccatcaatgatagacgggattaagaaaatgtggcacatatacaccatggaatactatgcagccataaaaaaggatgaattcatgtcctttgtagggacatggaggaagctggaaaccatcattctgagcaaactattgcaaggacagaaaaccaaacactgcatgttctcactcataggtgggaattgaacaatgagaacacttggacacagggaggggaacatcacacaccaggacctgtcagggagtggggggcagggggatggatagcattaggagatatacctaatataaatgatgagttaataggtgcagcaaaccaacatggcgcatgtatacttatgtgacaaacctacaggttgtacacatataccctagaacttaatgtacaatgaagcacacacacacacacacacacacacacacacacacacaattattcaaaatgttacctaatttttttttttttttttgagatggagtctcactctgtcgcccaggctggagtgccgtggtgtgatcccggctcactacaacctccgcctgccaggttcaagtgattctccttcctcagcctcccgagtagctgggactacaggtgtgtcccaccacacccggctaattttttgtatttttagtagagtcagggtttcaccgtgttagcaaggatggtctcgagctcctgacctcgtgattcacctgcctcagcctcccaaggtgctgggattacaggcatgagccacagcacccagccacccaatactttaaaatacccaattgttcagaaaagtatagcagaagataacatggagcttgttgtatattttggaagagttaatgaaaagactatattcagattttcatttaaccctgtattgattatttatcatacttaaattcactgtagtacagggatttgaatcataaaaagaatcttattgtatctaacattaggctgtatctaacactaggtagaagagcaaagtgttgaccttaaaagtgaaaaatttactaatgtggtttttttttattttcttcaatgaagtgtataagacgttcaagaatataacccaaccttgcatagacttgcttacatttctggttttatcacttattagagtgtaatttggttactaggtaatacaatggaaggaccacagtagtaaaatcagatttgaactgtggtctgaaatctacatattgtttgtctaacttttgatactaacaccacattctgtgcctcaactgcaaagttgtacagaagatgtaaccaccccatctaattcctgagattttctgaagctctaataagaaacagtgaaatcataaaatacaatataaatgcatgttaaaatcattgttttctttcatccatcccaaatctaactcataaaagtggttcatgaaactattccatatttgtttgatggatcaatatgtttaatagtctaagcagtgttttacaggtatatcacataccgaatctcctagaaggagatttatgtgttcgcaaaacacatatcgctgacttcacaggtctcgatgggtgaggaggaaagaaggcagcttgaaaatttgctttctgaaaatgttcccggttaatgctgatctcaatgctgattcaggcaccacacattggaaaacatggttctagagatgagataaaattaaagagaatagcaagatataaaaatatatgtgcatagtcacatatgtttttgtgaatattcaattaactttttaattgaatttcaaattaaacacgtatgcaattatacttcagtatatacagtcattctgtacttattatttaagatccaaggtagattggtttgattttattattgggctttggatactaatatataaattaaacttacctggacatcatcaatttctcctttcagataacccaaggttaacatcttttggtaatattttaaagtcagtattcattttactaaatttaaaatattatttttattgtaaaatataagtgaaaatacgaccactgtaaacatatttacacaagaaaacatattcaaaccacatgtcccatcctatgttaattcaggtaagttttttttttttaaacagaagcattctcatatttcaaaaaaacatcacaagcctaaatgaggaactcctggaaaagttcagacacaggctgaagtaacacatcttgaagtgaacctgatccactgtaagcagaggctggatttgctcaaggagcaccttggaactcaaagaaaagtagaatcagactgaaaaaaaaaaaatgccccagaagtgataaagtattcgataagcagattaatcaataaactcctgttgccggtctcttttatagccaagtagctggtgtcctctgcagctataacaggcggaggacggcaggtaaaaaggtgctgccatcgccacaggcatcactgtggcccagggaatacccataacttcccagcagccattttggtagaagttcttagggaagaagttctatcacattgtccaaggaataaaggtttgatcaggcagcaaactcaatagttatagcacataataggatccttttaccttcgtgactcatataacctcaccagaggctgtgatgaagaaatgcacctctttccttttttagatcaagggaattagtattctcattaatttcctagatctccttgaaaaaaaaaaaaaaaaagagatcctcattattcttgaaagaagtttgagctgaattaactgccaaagctgaagaaggattcttctttgtgggtttttttttttcctgtaatgagaagttactgcagtgtcttcaaagtctttggttaaaatagactccaagttgaatcctccaattattagatgtctcaagaacaaaaaataatgccaattgcaatagcaaactgtgcttttggtctgcaggaatttactaaacgtcctcatgcttcataaagccccataccaggatttgaagtagagatattaaagagtttgtagacctaacaaacctttcatattagaaacaaaggcaaagcagaaaagcctacagtcaacgtaagtctatgcagctaaacgccgtagttagaaaagctttagtggatgcagtgaggcaggaataatagtagtcgtttgcgtatatataaaatgtcacagatgaattatactttaagttctgatgttagaaccagtgagagtgtggcatagtacttataagctacaaaagcaaaatttgacagctgacgaggaagcactaagatctgggacgagccctatagcgtgcctcttttctacttcttttttcactggctttctatctctgggctgtgcaactttgaagagcttactcatcccatcattctaaggcaaggcataaagtcatttttgacatttatgaaaaaaatgtacttacaaatactctctatttgatatctctaaaatctaagggacacagtgaaatgaatgtcactaagagagctggggaaaacaaaatttccgcatgatgttattgcttcagactctcagtggatcctgacctaatggcatctatagcctatcctgacatcttgggaagtcatttctggactcatagtctacacattcatgggctctctcttggatatcacaaaaaatcccaggcaaatagtgctgtgttcatggtttaaacaaatgatttccatggctctcattgccaagattaaagatcttaatttgaaaaacatagcagcctctttgtttcattcatgatagttttattgaggagatagtatgagttcaatgttgtgccttattttgggaacacgacaaagcaggtccctttatggagtgtgtgttttcagttctataggatgccactggagtggattctggttagcagagaggcaggtggcaaggcttcagcatccaacacacccagattagaaaccccattctgccatattctagctttgagactatgaacacgtcatttgaaatttctgaattccagtttcctcaagtgtaaaatggggataatagaacctggaataaaaccaacctcatggggttgtaaagagtaatgatgacccactgcaggcccagaaataatattggttatttttgccttttccctaattatgtttgcctttgaaatgactgaaaaattatactggactacacttgaaatgatggcctaaaatcttaaataaaccaaattgagaagataatctgcatcataagaaattaataagataaaaatatgtgcttaccaagcatttagctcaaaattaattatgctgttctaaagatgtatacaaagaggagtgagttggttggctggttggtttttaagtatgattttcttgcacatgtgccatcagaaatctgtgggttgaacctgtgcactgggcaaaagctatacactttggatggctctgagaaaggccaacattcgtcttaaggaaaattatgggaaaccaaaaatcacccatatgcgtatgaagcatttttagtttctgctttgcctactgtgtctaaagttattgacaaaagagcaagaaaaggcttttctgcatgagaaaagacctacactttgggtaaaatttactaaataccagcatcatgtatttattcttcagtgttttatgtttgcgtccttttctatctttactgagaagagctctgatttataaggcatttgataatcttcctgaggtatccactgtggttgaaagcttttgggggggctctggaaagaagggccagtatgaatatttgggaaaggttgacttcttttgtcaactgacttcctacgactatgagattaccctgtgctaggaaggctcctcttttgttctgacttctcggtgagaaactgctctcaaatccgcttgggaactgatcctactataacaagatctaagggaagagaatataatcttgaagaaagatacagaagcagaagggaagacagtgcaggaaaagaaaaaacaggaggaagggcaaattatttggtcatttcttatatgcaagaataatgtgaatatagtacaggactccctgcttttatcagattcactacatctctgctatcttcacatttttggatgtcataatgttatggtcaacacctttgttggatagtgtcatcagatacactggtcacatgaaggatgccacgtggagaatgtttctctgccaaccttgcaacagagggcagatgtcagatcccttcaaaaccgcctttagagagtacatgaggaatgttaaatagggtatcacataacatgttatctatcctacttagccatgaaaaattctgtaggactctaaacctcccctgtgaatcaaatgggcaaatacaaattaacatatatatatattcagttaccactggtgaattattacttcagagtagtcaagggactgggaagcctaatgataaggaaaggaggtttaattcgacttactgggggtctctctagaagattcttctatacataagatgcccttaatattcaaatcaagttctcagttatatacactgtattaagcagggagatgttaaagatatgcagcctggttttcaatgagaagaaacaagcaattaatggtgaaatagaaaatcaaaacaatacttcctgtgtgactttgtgagataaatctaagtcataaaatgcacagacatcaagcttccagctcacaaatggctatgaattaaagaatggcactgcacgatggtagcaaacagatgtttaacatctttttcgtgtttattgaggaaagtggtctgataatcttgtcatacatattgagtttctactatgtacagagcactaaactgggctcagatcaataccaaagttgataaagcaattagaaacaaatacctaactacactctatacagactaccattaagcctaaatgtagcagtaagtgttcattccaggcttttcttaaattgacctgtaacatattacttactgttttcattttttatgaattctatataaatatggaggaattatcttggtttttaaattcaaaataaaaggagagaactaaaaaagacagaaaagaacagccatgaaaccagaccctgtaattgttttaaattgatggcataaaaccaaattacttacagggatttttttaaatacaaatccccagaccccatagatcttcccatcagaatgtgcatgggtgggatcttggtatacgcatttaaaaagactgaatttcagtttttaaaaataatcattaaataatattaagtaatgtaggcacactaggaatttgtacacttctatgcaataggagaaagtgaatttataaaatccttacataacatactttttccttttagcaggtcatggcatctgagccttcagcaccagactactggatatctacctaatagatcctttctctgtctaaaaatagtagacattgttacagccaacgcaatcttcagtttggaactttctagcaaccacacattaactcaagttgaaaagtgctaaacacagatgttgtacctcctgtactcctttggggatgtaaagtatcttctctcctctgtccttgtcttgttgagatgtgctagacactttttgagtaaaagactttcctttatcaagactcagtgtcataaataaatggtgtgggtgggtgggtagtgtacatctgtaatgacctgaaacagtgcttcttagagtgtgggtctcagaccacctgtactagaagtcatcaggagcatcttaaaagtttagatttctagacctgatcccagatgtactgagtcagaatccctaggggcaaggcataagaatctaaatttttaagtcagctactcaggtaattctcctgcatactgaaatttccaaaacactagaggaggtgctctctgaggtcccttcaagcccagatttttatataagtcagtcatctttacagaacagactgataaccttctagtttcgatctgatgctctaatttctgaaaaatcccacttttctttttctgttctattttaacctgcatgtttaattaattcacaattctcagcatgaattaacatatggctgctagaaagttgcaaactggagattttgttggctgtaaccttgtctactatcgctaaaaaggaaaacaatcaattatttcccgattttttaaaaaagatatacattagataaagtatggtggagaaaatactctcttctgaaatgacctcgccaaatagtctttatgtttttaactacgaagtgaaccatatgcaatataatcacttgcacatattcaataaaaaagcagggttaagccaaattttgttaccaccaagaatatttgtactatacataagatgttttcaatagaaggattgagactttttttatctggcttataaaaggaaattgctcccttccctaaaggaacacagagaaaagctgatacatcttcagaaatattcattacagctcatatcttttaagtgaaactcgctatctggtgttgattctataaagattaagaaacttgtcatggttgtgaataacccaggtgcttcaaagctacaaaatagacaccttagatggtttgatataggggatttatcccttcaccttaaaaactctcagatttccaaaggatgtctgtggcttctctattactcaatgctccagcatccttcattagggggcatggcactttagtctataatccttagtccctgggaaagggaacacagtggatttcatttggactaacatggaagtgactgaaaaagttcctcctgtgttgggttttcttgcggaggagcagaagtagtgagatgagaaggggaccccgagcaataaatggtgctccattgggttggaggtgggcatcataaaatttaaagaaggttcaaacaggcaaccttttaagtcattacctgcaacccaccctcttacctgcttatcacacaggatcagtaattctttgctttctggctgttcctaatgcccacatgagaaaaataaattcacttcccccccaccacccatgtaacagaaaatatgcacacaccaagaaaggaaacttcgctctagcatgagaatattataccagctgagacaaatttattgagattttgatagacatatccatgacttcatcacaagtcatgagtgtcatggaaaattcaaaagtagctcatgacaagtgggaggtcaaatttccgaaaatgtcccagagaacatcagccaggggaggcagcttgaggaagcgtctgctttttcattttcctcccctgggactcgaggtaagttggaaagcagtgtctctgaggttgatgagcaaatgaggactgaaggagtggatacggggggaacctggagatgtggggctcagccttcaagggagagaagatgctacacctcggggatttcagccaatcagtagagagcaaatggcgagtatctcctgtagccgaaagccccacagccgttgtagccatagccgaagccatagcccactggagagtaggtgctgccatagccacagccaacgctatatcccagcgggtagccatagctgccccagtagcatcctgggaagacagccccggggaagttgtcgcagagcatggtgtcgggagtggagggcttaggtagcaacagagtgcgtttcctcagtgggatggattcctagtctcagaaccttctttatatatcccagctctggtgggtggtgaaaaacacaaagccctcattttcattcttgacaccaatttacattctaaaaagctcattaacttgttttgctcttgcttatgatgtctttacagtggcttaagaaagctctcgtgtgatgcaatacagggagaagatgcctttaaacaaattatttcccttcctaaaaaaaaaaaaattattgccaggacttcaaagcactctgtcttatagaccccatataactctgtaagcaggtatataatatcaagaaatattctgaggttgttagctgttatgcagtcctcttgctctctgaatttccacaacacacagttgaaattcaataaatatgtgttaaatacattaatatataaaataacaaatggatagtgagtctatctcaaaattctcaaaattaaagtatgtcttagtattcacctgcttcaaggattctcttttttggaatatgaaagacaagtgcaatggaactcatgagaaagagtcttttttttttcctctactacagctaccgtgtttgggaaactggttaaaagtgtaatcttaatcatagtcccctcctaaactatacctaacatcacatttctagaagactacttgaattaatagtattgagattttaaaacggagtatttggattaatccttgtactgaattgtcaaacaaatttaattttttggcctgaaacatatttcaaactaaacattgaaactaataaggtaaacacagaaaaatgaattaaaaaatttattgtaagatttaaaattttttttctcttagatctaatgaaactagattgtctgacaaatgtgatgatattataaagggccagatgacaacatgaaatcagttatttcacttttacaatgatcatgcaccccaggataaagaaggaatgttattcctttctaaacagagagtcagttctcaagcatgagttaaaggagggataaggctgatcaaaactatcttggatcatgtaagacctgatatattattctcagacacctgcattaagatttcttacagtggcacttagtagagaacttacagaacaaataccaaagagggcatatggaacagaaataggcacagagataataggaatcattctagaaggccacaaaacagatatgtattacacatgagctctcccagattttacttcataacccagaggtaactttgctccctgctatcagcagctaggaatcaaaggctgaatccaagaacaagatgagacacttggaaaattcaaaaccatgccagtgttctagccagcagtagactaattacagcagaggcattttttttaaatatagatatatatataatttttttttgaggcagagtcttgctttattgcccaggctggagtgcagtggtgcaatctggactcactgcaacctccacctccttggttcaagcgagtctcctgcctcagcctcccgagtagctgggattacaggtgcatgccactgcgccaggctaatttttgtatttttagtagagacagggtttcagcatgttggccaggctggtctcgaactcctgacctcaagtgatctgcacatctcggcctcccaaagagctgggattacaggcgtgggccaccgcgcctggcctaaatttttttatttttagtttttgtgagtgcatggtaggtttatatatttatagagtacataagatgttttgatacagatatgcaatgcgtaataatcacattctggagaatgaaaacacctacagtaccctgcttcgtgagcaaacctggatggctgcctatggggattcagtaattaaaattcaaacacgatatgtggcttatagctaaacaagttcagggaattgaaattagatttattcccaaaacataaaggtattcaaccacagatcattccctaaaaatcatagaatgatttacatactatttctactggcatcacattgctgtgtttcatgatagaaaagctggtaatgttagggaaaaaagaaaaattagacaaaaaatagcattgtataatggataatttaaaatttttgaattaatattgccaaaggtcaattatgttgctctatttaaaagaattctcccattcgcctacccaatctgacaagatgctagctttgccttctgcagcacaaaacctagctctgaacatgaatagtaattaaaatatgttgtcttttttaaaacttaagccctatttacagagaatggcttggattttctctagaaagtctacagaaaattctaacagaagaaaattttagggaaacatatcatttatcaacaagtcatttaaaaattaatagcgaagttaatcctatattgagcctatgaaagctttattctgataataggcttatcaaagaaagagcaaggttttcataaagcctgaaagtatacaatgctgaaagccctttttcttaaaaagtatacaatgtaataaatataaaattaagtacaaaagtatttgttgagatgctcaaaaaatcacaaaaaaattaaactcctaaatatataaagcaaatattaatagacctgaaaaaagaaatagatagaaatataattatagtacagagcttcaataccccattttcaacaatgaatgggtaatccaaaaagaaaaccaataatgacacattgtacttgaacttagaccaaatggacctaacagacgtgtacagatagtccatccaacagcaacagaatacacattcttctcaagcacacacagaacattctccagtgtatatcacacgttaggccacaaaataagtcttaacaaatgtaagaagaatgaaatcatatcaagcatctttttcaactataattgtatgaaactagaaatcaataacaggaggaaaactggaaaattcacaaatatgaggaacttaaacatttcctgaacagccagtgggtcaaatgaggaatgaaaaatatctccacacacacacacacacacacacacacacacacacacacacacacacaaaacagaaaaaaaaaaccaaaattttggaatgcagcaaaaattctaagacagaagtttatagcaataaactctacattaagaaaaattagaatttcaactaaacaacataattttatatttgaaggaactagaagaaaaagaacaaactaagtccaaagttaccaagaaaaaaggaataaagatcaaagcagaaataactgaaatataatctgaaaaacagaaaagagcaacaaaactaagagttggttttttaaaagataaacaaaattgacaaacctttagctagactaataaaacaagggaaaagacaaataaaatcagaaataaaagaagagatattataacatactccaaaaatataaaagatcataagagactactgtgaacaattatatgccaaaataattcaataacctccaataaatggacaaattcctagaaacgtgccacctaccaagaatacatcatgaataggaaatcttaacagaccaataacaaataatgagattgaatcagtaataaaatatcttccaacaaagaaaaatccagagccagattgcttcaccattgaattctataaaacatttaagaagagctaatactaatctttctcaaagtccttcaagcaattaaagaggaagaaacactttcaaactcattttatgaggccagcattactctaataccagtcagacaaggacactatgagaaaataaaatgataggacaatatccctaatgaccatagatgcaaaaatactagcaaaccaaatttaaaagcacattaaaaagatcatacacatgatcaagtagatttacctctgataagcaagagtggttcagcatacaaaaattaatcagtgtaatatactttacacatgaataggatgaaggataaaaattatttgttcatctcaatcgatgcagagaaagaatttgacaaaattcaacaatccttcatgataaaaattctcaacaaattaggtatagaaggcatgtacctcaacataacaaatgaataaatcagtaacagtcttagaaataaaacaagaaaaaaaagtgtttcaattgctcctattgtttttaggataatattttttaatctttaaactgacctaaaagttctcaactctctcttcgttaagttttgctgtcttttagttcttcaaacttcgcatgctcctctcactcttaagctttgacacatgccgtttgttctgtgaggaattctcttccttcctctccttctgatcaactcccatgcaaccttcacatgccagctcaatcacttcctttgggaggcctttctgccattcctgattagctggagcccatctgtagcataacagtaggccaacctcttcctcgtatctgtaggacttaatcgtagttcctatataaccttcacttgtgtgatgggtatctgtctgcctcattaacatgcttatttccaggagagcaagatagtatttttaatcagccttgattcctcactgcctcactcactactgggcgtaatataggttttccataagtttcagttgaatgaattaatgaaagaatattctaaacctaacttggctactcacttgctgtgaggattgaggcaaatcatttttccgggcctcgcgtgacccgactgaaaaatgggacaagttgacttcctgggacttgccaccctaaacattgtatgattctcccatcaaaaatcactgatgagtcaatatgacaattcaacactctctcattggaatttggtcaattaggcatgcgactatggagagtgctttttctcatcttattacacattcctactaagacaaactaatgagcttccagctgccatcactttgaaaaacaaaatgcagtgacaggaatcacagaaatattgaaaccttcacaagaatatcataagagttttaaaagtttaatctgtgcaagaatctcccaggatacttgttttagacaaatatttctgagctccattcctttagattctgattccgtgggtctcatgtggggccaaggaatctgcatttttaataagcagacgaggtgattccaataaaggcggtgctttggtcaaactttgagaaatgtgcagtgctctttaataaggtacctgaaaaggtgtcctctttagcaaaatatacaacataaaatgggatgaatgtggaacggtgaaggagaaaacagagacactctttcagccaggtttaatggctaagactagagctgatgtgacatcattatgggcaactgtgctcccaagaggacatttgacaatgtctggagacatttttgtttgtcataactcagagttggaaggggtgctacttagcatctaatgggtagaggccagggatgctgccaaacattctacaatgcacaggacagccctcacaatacaaagaattacccagctcaaaatgtcaatagagctgaggtcaagaaacctgctctgaagtcaaaaatcacaccaagtcaaataaaattgccaggcaaaatatatttaaaaaaaaaaaaacctgtcatgtgacaggatcagaacttgctgaccaagacttaggctaatttaagacaaaatttcagtacgttgctaccacagcactttgagggataagccacgtttgtgaggctgtgtggttaattatcacagcaagcatctggttaatgaagcttaacttcatttgatgcagaacctatgtggttttcttaagaaataacgtgataccacaacaatgcctggatgcacagtagattcatggactctggtcagaaacaccttacatgtgatttataatgaacatgaaaaagcagttcaaaggaaggcacgtttctgctgcacgcttttcatcactggtaggataagaaggtcagttttgacatctattctctattcttggggatgcaaaacagaggaattaaggtcctcttcttgtgacaccaaggcagagttagagccagcaactggaattgtgtataaatttaaattaaagcaccagcctgcaagctgagttagtggaaagggtaacagatagggtcagttgtaccccctcagtgtgaagatgatctcactgaagaatagaatcatgatgcttcaaatcatttacccactggttggcctccggaagaccgagggcaaatccttctgacaacctttaaaataatgcttcctgttactgccaaacagcaaatggcaacttcaaagcattatgtcatcaaagtctttgctgaccaaaactaaacataaaataaaatttaaatttaaccaaaagtatgaccagttccaaagatttctttcttaaaatttaaggttgttcatgaggaaagtcttaaaaattctgaagttgcaccctagtacattagatatagaagcttcaaaatggaaattggaaggcacacttgcaaagcagatttctaagagggaaggatgattggaaagggaagaaaaagaaacaggacacagcagtgcaaataccgttatcaaagataatgtcagaagcctcagaggcaagtcactaaaaaggaattgaagtctgagaaataacagcttattttcagagacaacaatgcttaacatgtttagttttatagaatacccaaagagttccctgcctagcaagctttagaatctggaaatatgtccctttatctaatagaaggctctcctgctacaattttaagtgcttttcctctatcctcaatggaaatgaaaaacataatctggtttttctgtaaatagcaataaaaaaatgaacaaaagtataggaaaaataataagaaagagaaaattttcttttcttgataaaaatgtcaatactatttcatcaattattttaagaatcaacagtgagaattatctccctttctacttcctttgggataagagtcaacagaactgggccagtcctgaaactttatgtgcacacaaatcacctgagaatcttgttaaagtgtagagtctaatttaatagaggagaggcctgagattctgaattttgaacaagcacaaggtgatgccaatgtgtcctgtctgcagatcatatttttttgagatggggtctcactttgttgcccaggctggagtgcagtggtgtgatcatgtctcattgcagcctcaacctccccaggctcaggcaatcctccagccttagactcctgagtagctgaggctacaggtgcacaccaccatgtccagctaattttcgtttttgttgttgttggtggtggtgctggtggtgatggtggtggtgttggtagagatggagtttcatcatattgcccaggctgctctcaaactcctggcctcaagtgattctcccacgttggcctcccaatgtgctgagattacaggtgtgagccaccatgcccagcctgcaggccatattttaagtaacaaggaaatgggcttttttttctctaaggttttaaataattacattaattcaaaaaaatttatcagctgggcatggtggctcacacctgtaatcccagtactttgggaggccaaggcaggtggactgcctgaggtcaggagttagagaccagcctggccaacactgtgaaaccctgtctctactaaaaatacaaaaattagctgggcgtggtggtgggtgcctgtaatctcaactattcaggaggctgaggcacaagaatcgcttgaaaacgggaggtagaggttgcagtgagccaagattgtgccactgcactccagcctgggtgacggagagaaactcagtctcaaaaaaaaaaaattatcaaatgtctgggatccaaagcacaggtgatgtaacattgaataaaacatggtgcttgacctcaaagaacctacagaatacatcgtgtaatgagggaatcacaggcatcagctaatgaaggcaccagtaagaaagagaaacagcagccccaataacactaacagtaaaccagaacttcccatctgcaacttccagaacaccaaatcagatgaggtcaggctgtgatgatgccagagtgagacaaaaataagatccatctgtaatcacatctgagaagggagaaaaacaagtgcagtgagctacacaaaccataaccatgaccacacgttacctttggtgactgctgcttctttaccaattacaaacatagtcttgttccacctcctaaataaaatcctttgaaacagctgatcctagaattaggctgcgataggcggaataatgttccctgaagatgtcatcattctaatcctgtatgttatacagcaagtctgaattaaagttgccaatctgctgaccttaagttagggagatgatcctggattacctgggcaaacccagtgtcatcacaagggttcttataaatagaaagggaagacaggagactcctgtatcagtatccgaatcaaggagagagctgggaaggtgccgtgcggttgtcctttgaagacagaagggacacagccaagaaatggctgggtgggagggctggggtgcaggcaggaccagcccacacagtcacatccaggacacatgtctttttttgagagcagtgtggagccacaaaagggttttaagcaggggagggatggcatcagctttgattcttaaacccctttaccccaaccctggcccccaagcagaggcagcaggtcaggaacaggacatacatttgacagatgaggagcttgaggccaaagaaatgcggtgcctggacatccagccggcaggcagcctcaagaaagtggaaaatgcaaggaaatgaattctgctctagaccatccagaataaatgcagcgttaccaacaccttgatttgagcccagtaagacccattttgaacatcggacccccagaactatacaagaatacatttgtgttattttaagccactaaatttgtggtaatttgtgacaacgacaatgggaaactaatacagtatgcaatgtagaagagacctctgcctccttcgatcttctggaaaatcacctaattcaagcccaaatcccataacaaacccctcctcgcaccctcttagtgagatatcctgcagtttctcatgttctgtgatctccactgtggcaacaagttaataagcctaacttgtttgactataggtgtatttctggtggtcttggttagtggacttcaacagtgcagtgtgaacaatatgacatcaaagtaaacagagatgagacttttcaactgggaaaaggagagcaccctggggtggaggaagatcttttgaaggatctgtaggagttcactagattgaaaagagtgcagaagggaacaaaaacctgtgatagtccccactgcaggggaaaaggaagcacattaaggagaagtaggaaataaggctagaaaatttggtagatctgtgagcctctacttgatcattgtcctgaaaaccgtaagaaataaaaaaaaaatcaccaaagagtttgcagaaaagagctacacaattagacttgcatttcgagagattattgtgcctgttgcatggaagatggattggagactgcctggcagaatggataagtagctgggctagtaacccaggcaagaaatgatgcaggtgtgaactgaggcagaaatatcaggaatgaagtcctgacaggatttcttagaaaatctaaggacttggtatcaacataaagaataaagcctaataattattaaaatctttttggaaagcttgtgaaaatggcagagaatcttgataaaataggtgatatagtttggctctgtgtccccacccaaatctcatgttgaattttaatcccagatattggaggtggggcctggtgggaggtggttggatcacggaggtggtttccaatgacttagcaccatcccgctagtgctgttttatgacagagtcctcaggagtttcaaagttgtttaaaggcatgtagcacctccccctttgccctcttcctcctgctcaagccatgtaggatgtgactgcttccccttggccttccaccatgattgtaagtttcctgaggcctccccagccatgcttcctataccgcctatggaaccatgagccaactgaacctctttgctttagaaattactcagtctcgggtagttctttatagcaatatgagaatggacaaatacaattaattaagtcaaattggaagactcatgatcaatgttctgcatttgttatcagtggcaggacaatgggcatgggaggaatcagagatgtcagcttgatgctctggaactaatacagtatgcaacctagaagagacctggcttcctacagtcttctccaaaattacctaatgcaagcccaaatcctgtaacaaaccctcctcactccatcttattgagatatcttgctgtttctcctattgtaaggtctctgttgtggcaacaagttaataaacccaactttgtttatctgtaggagtattcctggtggtcctggttggcaggcttcaacagtgcagtgtgagaatatgatataagagtaaacagagatgggacttctaaactggaacaaagaaaacttcttattcaagcttcacctttctcacctattgaacatttgcccacttaggcaaattacttagtctccatcaatttcctcatgatattgatttcccaagatagttgtcagaattaaataaaattctagggaagtattttttaactcactatgtaaacataggaggtataattattaatggcataagaggtattctgcagggatatttctagggaacagctctataatttggaaagtgatgtacagtttgttttaaagtggaggaatggattgggagtcagaccctccttacttatatattagtgttttacttcacagatgaatgatacagcctgaaacaaattatttaacttctgaattttggcttcttcaataataggtggataataaaatctacctctaaaaattattatgcaagtagtgaaattgtctattattgtatctgtcacactgttgctgcaagagaaggcaagttgtcattgtaacttgttaatcccttcttgaccctcctcaaggaatacgtggtttttaggtgcaagatgtcagagttaccctacagatttcgccctccttcttccccagaagccattaaattatagtaagggagtgaaggagtggaagccaacaataacagagaattgtaaggatgatgtcaattgaataaaggtaaactacatttctggaagttgcaaaggagatgaaggaaaatcacaaagaaaaaggagccatagcagaaattgtgacaagagggagctaaaggaaggagtgagccttcaaactcccatagagaaccgagactcacaacattaagaatcaatgccaggattaaggctgaaacagaggaaaggtggtacgaaatctagttgaagaacagggggttctgaggccactggtgtagtcacttggtcagcacaaaggacctttacactctggcatttgaagacctcccctcctaccaaaagctcagcctctctcttaccgtaagcaaattctgtccctcaatgaattctgttcccacacacagagctccagcgcagcttctgagtgtgtcattcttaaatcagaaaggacaattaaggatcatagcaatgattgtcataccatatgatacgcagcaatgacagcacagcagtgagctcccttagcacccatatcttacttttttttttttttttgagatggagtctcactctgttgccaggctggagtgcagtggcgcaatctcggctcactgcaaactccgccttccaggttcaagcaattctcctgcctcagcctcccgagtagctgggattacaggtgcccgccaccatgtccggctaatttttgtatttttagtagagacagggtttcaccatgttagccaggatggtctcaatctcttgacctagtgatccaaccccctcagcctcccaaaatgctgggattacaggcgtgaccaccgtgcccggcccttaccttttttttttttttttttgagagagagtttcactctgtcgcccaggctggggtgcagttgcatgatctcggctcactgcaagctccgcctcccaggttcacaccattctcctgcctcagcctcccgagtagctgggactacaggagcccgccgccaccatgcctggctaattttttgtatttttagtagagacggggtttcaccgtgttagccaggatggtctcgatctcctgacctcgtgatccgcccgcctcggcctccgaaagtgctgggattacaagcatgagccaccacgcccagctgccaggcccttactttctaaataccagtctgcacttaaaaaattcagagctcctgggagaaatccctgactctattataagagcagaaaagttcaagacgagtcagacaggaatatcttgttgagccagaaagaaagaaaatgatcaaatagtgatgggggacacttccaaaggacatagaagccagcacgaaggtattcccactgtccaaatctgaggcactttgaagatcaaaataaatattagtggattatcatacattgagtaaaataagaatccatgaacccatactgatataagcattggcacatataagtaagcaaacaaaaaattaataaatggggaaaagagaaacttctttcttacagtagaatgccaactaataaaggtaaagggatttattgatgtaaaattagaaatttgtggatgaatcgtaaaattgacaagtaaaaacttggtaagaaataagatattcacacagtgccaaagtatcaactcacaaattaattattaattacaaagggcaaagagcaactttacagtaaagaaacctgaaaggcgcaactttccccaagtgatcaaagttaatatcaaccaaactacatgagccaacataatgtgcctcctgatatgatgtgctgagaaggataaagtatcacttcaatgacatttccaccaaaagtgcatgatataaatctaatcgtgaggaaagtcaaacccaaatcaagatacattctgtgaaatgactgcctgcattcttcatattggttgaggtcaagaaaggcagagaaaagttgaggtactggtccacattaaagaagactaaagagacatacataatactggattggatcccgaagtagggggaaaaaaagtacaaaggacattagtgagacaagtgattacatttgagtatgcactttgggttagagaatagtattatattaatattaaatatttaatttgtatagttatattggctttgttcttaagataaatggtatgatatctgccacctattctgaatggctatccagatagacagacagagagagagttgatagatagatagatagatagatagatagatagatagatagatagacagacagatagatgatagatacatagatacatacataggtagatagatgatagagatacacacacactatacacatacatcatatagcatatatactatatgtaataatacattcgatggaagaaaaatgtaaatctgagaatgcaggacttttttgcactattacagcaaatttttcataagtttgaaatttttttaaataaaaactaattaacaaaatacaaaacaattatggccttaaagtagaaaataaatgttagtcataaagatagaatctaaagtcttatggttggtagagatctcaaatcacctatccagtactcaacacccttggaatctctccaccaacaggtcatcctacctatgcattggagccttgccagtgataacctatttcatccttaaatagccttattctttttcccatttgcacagccatatctaacttgatatgtaactcttactccctctcatggtcatgtttacgtaccgaagcttcccttctatgcaagcctgtaacactttgtgtgtatacatggttcttatcacagactgtctccaattttaggtcctaggaagcaaatgagtaaggaatatctatctgtctttggatagtcatttacagcacattgattgacatgaaataggagactattaaaagccctttaaatattgaataaagtgtatttaattcttaagggcataaattgtgtttcagttatctctaagatttgtgtccccaaatcttaagacaatgctgtgctatactatgtgatgagtacctcttgaatgaataaatctcgaagacagtcagcttctcatatcaaaaacacctctgcttagttgtttttacaactgtaaatatcttaacacagtggccacagcccaataatacctgatgcatgcatgaatgaactttacattggacaatacaatattttgcacccataaagcagagatttaacaagtaaagtcaatgaacaattaatcaagcaccttctctcaggcagaggtgcaataaatacatgatatgtgaatgaatgagttttaattcaaacataaagtgttttgcttcaataaagcagagatttttcagtaagcaagacagggagcattttcttttttttttcttttattattatactttaagttttagggtacatgtgcacattgtgcaggttagttagatatgtatacatgtgccatgctggtgcgctgcacccactaactcgtcatctagcattaggtatatctcccaatgctatccctccccctacctcccaccccacaacagtccccagagtgtgatattccccttcctgtgtccatgtgatctcgttgttcaattcccacctatgagtgagaatatgcggtgtttggttttttgttcttgcgatagtttactgagaatgatgatttctaatttcatccatgtccctacaaaggacatgaactcatcattttttatggctgcatagtattccatggtgtatatgtgccacattttcttaatccagtctatcattgttggacatttgggttggttccaagtctttgctattgtgaatagtgccgcaataaacatacgtgtgcatgtgtctttatagcagcatgatttatagacctttgggtatatacccagtaatgggatggctgggtcaaatgttatttctagttctagatcgacagggagcattttctaagtgtagacaacataccatttcaagtgcttttgatggcaactattatttcaaagaataaacacttcatttttagtactagttatatgtataatcagaggtgaagaaagtggagaaaataaacccatctatcaaaaaaggataaaaaataatatgtgattttagtagttggcttccctttattgatcaaatcttaggaactcttaaagatagagtttcataactaagtctatttagttccaattcttccaacaacatgaggggttcaaatctccccagagctgagttctataaacagtaggaaaggagaaatgaaccaaaatggaatcttgtcactaaggaaaagagaaaagaaaacatgttttagcattcaacagctaagaaatattcctgttttataatcagctttgagaaacgccaacaattgcagtatatctgggttaaatacgggacatttccagggagttttttaaattgaaatatcaatataaaaataaaaaatggttaggcatcaccctatcctggctatatagtctgaaatcagaataaaatttggttaaagtcaaccattacgggtttaaactgattgatgaattcaagagcataaaagagaagtgaaataaataaccaggacaaaaatatttatgctgaaggaaatagatttattaagagactgacagaaaatccccttactacccacacccaatttgtaatacattaatgttgatgtagaagctaataatacatgagcagagcaaccatgggaggcaaactactttttcactgttaaaattcaagtatgaccaaaaaaatgcatcttgcttcctttgtctgtagatgagtatcagttcagcacctgagtcctgggtgacttgtccaacagcatcaaagacaaagaccacagcaagaagtcagcaagaagatggaagatgtatcacccaagcacatgggaaggtaggaagacagtcattgctcttcaggttgttctgtgcagagaattaattgagagtcctgtagtcactggagccattggtccatcagtaggtgctgtagccaaagccagagccagagccccatggcctatagaagctaccaccatagcagccgcccaggttgttgatgttgctaccaccaaagctgtagcccagggagctgtagccattgcatccacagccatagttcaggggagagcccagaggcacaacacagttcaagggggtggctctgaaggtcccatggaagttggtcccatagatagggtatcctgggaagtagcttccacagcagaagtaacgagtcatggtggcagcaattgagaaggatttagatggattgtgaagggtaagttacccaagtgttaatgaaggtctcttcccgtacagggctttttatacctcaagctggtgggcacaacacatctgtctaaacatcttcccactaatttgcataggtaatctcattcttttctaataaaatgcttataaggaatgcacagactcattgcccacatttttgttggcttttctctgtactattttaaagccagtgaccatgcttgacacgcaatcgaattcttttcatcagagtcccatagtttaactactgttcttgattgcatcatgtgagactctttaaatcctctgattataaactcttcccaactgacatagctaaactaaaaaagctttggcaagaatgcaaacacttcaagccaagacaaagccatatattgaggtcttttgaacattattttgaaacatcaaactgaaattctataacctcttgaaattcacccatgtgcccttttaaaacaattgtataccaactagttaatgggtacagagtttccttttggagtgaagaaaatcatttggaactagacaatgttgcaaaacatttggaatgtactaaatatcactgaattgttacctttaaaatgccttggtttgtgttatacaaattttaactcaaaatgtattttttattttaaaaagcactgctacacaaatctatccaaccaggtgtttttacagaggctgcaatggtgccaaataataagttggctgtgaataacctgcaagtaattttcatcaatttcatttatgagcattctgtttgttaatacatattttattttttcatggagaacataccatgtttgcttgtaaatcatcttgaacattgccaaactgtctttctggagttgccacactggcgctgagtgggatgatgctcaatttcagagtcatgttataccacacttgcttcttactgactcctataaaacaagcctgaatgccatgatccattatgaaataccagttatatttaaggatgcaacacttccttctgctcttattttgccttacataaccaattctcatgaagaacgtaaaccaggaaggatctgagctcagcaaagctaagtctattccaattcaaaggtttacgacatcatctttttatatgtgaatcaaagtcagaattctctgaaagtagaagaaaaaacttcctgaataccaattcctttttttatttccatcttaacagacaatcacagagtccaatatgcaaaactaatcattcctctcagacatccctctctctttaagattctatctctctcagtttctctgacagagagctgcctaaagaatgttctataagtggatatgatttcttttattctacaaattaattaaatgtcataagagtatatagagaaagttaaagaaaaataagttataatttcaaattcagtttaacaaaaagaatgaattaaaatggtaagaggttgtgtcctcagggtttaaattatataaactctgtatcagataatccagaaaactcaaaaatacgtttgtgattaggagagggcaggggtgactaagaattacgcgtgacttgaaaaatttcactactgattctatcacacaatgacattggaacctgtaatttgtacatgctgccaccaggtggcagtggtatttcagttactccgtataaaccacaggactggatttagggttctcaaatgtaagcaggtagaagaatcttctaaagaattcgcttgaaattcagaattccaggagctctcctctcccaccaccacctgagattctggaaatctctatttgtaatgggtatctcaggtaattctgatgaataaatcatcctgataaattccagggctggtttgtcatgagaattcaaaaaagcttttgctgggctgtgtgaaattgcccagagatgcttatctctcattggcaggagtgtttggtttcagtcgctggtgacttatttcccttaactctggatgatagaggtaattaaagaaaaagctttagtttgtcctcttccatttcttgatgctctctgcttcttgtctcaggacacacctgattagaaagggaaggtaacagcaatgtgttcaagtgtctcctcagaggtaaaacccacctatgtgactgctggttttgttacccataatcaaaagaaaaacttatattttctccttagcttgttttcactttcctatctcttactagacatacccagagaaaattatcagccaagtactcgattgctattcaatgatttttaagattgataataacaaaaaatatcattaaggacttactctgtgctagactctgttctaaagaatttgcacatactacttaattatatattttacctctatatatagtaagaaggcttactatgcactattccaagcatttgacaagtgttaattcatttaatttttataatgatcttatgatgtgggtattatgattctttataagaaaaccgagtccagagggtttaagagaattactgaaggtcacatggttaatagtcagcagaatcaatctccaaacccatgccatctacctccaagccatgctcttaactactttactatcctgcttttgatatgtcattaaggctttaaagggatatagcttctacatgcctcaaatctataattcattgcattattttttgaagaacacatcgatctagcttttgctgctaaaaactagaaaacaaaaaaacaaaggctagtttttgctgctataacagacagacatccaaaatttccatgttcagaaatgtattgcctgctcacactatgaattcctctcacattggtgactgtcttggatacacatcattttcactcaaaagactcaagctgacagtgctttgattatctgaaatatgacaaacaggggaaaatgaatggggcaagccatggtagcttttaaaggctctcctcaagtgttatacaccatttccacactctcctcatttcctaaagtaagttccacagccacatctaacttcacaggtcacgaagagcaatgctactatgtgcctggagggcgaaagcctacaatgtcaccgaacaacattaatgacttccactgaatttctattccttacatgggctaaaataattttaacagattttaacacatatttcaaaagattagatgagggcagacataaaaagttttttagaactttacatatcataatgtaaaatggtcctgataattctaatcctgaacaattttaaatatagaggttttataagttgtttgtgcaattcatgtaatattagtcagcctttggttgtagattagcatgtagctttaattccttttctttgttttcttttctccatttccccctaatcactatgtactctaattgagggaaaagttgccataaatattagttttacaaagaaaatccctcaatgccaattgatttggtggggggagagattagttctaacaccagattttatttgatttatttgaatgcatgtattttctttaaagaaaagagaaaatgaattgacacatagtatttacaaggaaaaaaataagcaataaggagcctacatgacatattcacttggaaatttgagaacttttatcaggcaaggatcagaccccactcatagcctcccagcctctcccacctcttatgcagctgcccctataggaatcatcttggtgtaggttccaactcacctcaagctggtacaacatgatggagctttacatcagtcccctcaccagatatctgtcatcccccacctggggacttcacctttaatagctaggatagagactggggagcctatctagggcccatgcttgcaaaacctgaagtgtagggcagttaatgccctgtggagcaaaacttcgaccaaaaagaaatggaagtgtggatatattctccccttttctccatggacagacttgcctgagacagtcctaagagggttaggcagcttcttggggaatagtgtcatggaatccagcacataattgcttagctatggtcaactggatgaggcatcttcatttgagcactccaccttccctgcttcacttcccttacccttcgctccttctcctgaagaaagcaatagtacatgagcccttcacctgaaactctgctttctagaaaactcagaacagaataccacatcaaaccatctttggaatagcacctttactgagatgtaattcacatatgataaaattcacccaaaagtgtacaaaaagtatacagtgggttttagtgtatttatagagtccatcaccactaaccaatttcagaacattttctttaccccaaaaagaaactccataaccactaaaagtcactcccaatttacaacaactaaactaagttctcattcataagacttaagctgacagtgctttcattatctgaaatattacaaacaaggcaagaggaatggggcaagtgacggtagtgtttgtttgtttgtttgtttgtttgtttgttttgagacggagtctcgctctgtcgcccaggctggagtgcagtggcacgatttcgcctcactgcaacctctgcctcccgggttcaagtggttctcctgcctcagccttccaagtagctgggatttacaggcgcccaccaccacaactggccaattttttgtatttttagtagatacggggtttcagcatgttggccaggctggtcgcaaactcctgacctcaggtgatccacccgcctcagcctcccaaagtgctgggattacaggcgtgagccaccgtgcccggccgatggtagcttttaaagattcttcccaaatgttgtacaccacctggacacaaaattaagttctgtctctgtgggttttcctattctggacacctcacataaattgaatcacacagtatgtggccttttgtgtatgatttctttctcttagcccaatattttcaatattcatccatgtcatcacacatatcagtattctttattgtcaaatagcattccattgtatgaatataccacacttcgcttatctattcatcagttaacaggtttttacattgtttccaattttggctgttataaatatactgctatgaatattcatgtacaaataatttttaacatgtcaaaacttaagctcttaattttctcctagacactcacttcttctccagcctttctcatctcagtaaataacactaccaccaaactgcttagaacacaaactaaatttctttcttaatgataattccttcaacccctctgtccccaggtccagtcagctttgcctccaaaacatagctcaaatccatcacacttcttcactctctctgctgtcacctcatcacaccatcatctctgccctgagccactgccagagcctcctcattggcttccctcgtcccactctccttccactctacagggttattcctaaataccagctactgtggcctttaaaaaataaagtgtgttttctcctagttcaaaagcctccagtaactttctaatgttcttaagaaaacaaaaattcaaacctctgaccatgatcttgctcctgtgtaattgtcaaatttcaccacatcccattcttcttcccttcctataaaacagtgaagaagatctccttccacactgcctgtcttctgcactggaactccctgaaggtaggcacctcttctgtcttgttcaccattgtatctccagcatcttgtatagtatctgactactacgtaattgggactcaataaatatctatcaatctgttgaatataggaatgaatgaatgaatgaatgaatgaatgaaatgaatgaatcttgtgaagatgataccagtacggagaaatatgacagaattccaaataccctcctgatggcaagatggagatctgatatctccttgcccccaaccagtccagctctgtgttgacatcctccctggcctccctgactgtgtaacactagttattggactctatgtagaccaaggataaacccatagtaggcactgactctcctggattcaggaggtagggttgtctttggctttctagaaatgtgtgttttgatgggacagataaaagacagaactcatggctgggcgcggtggctcacgcctgtaatcctagcacttcgggaggctgaggtgggtggattgtggccaggagttcgagatcagcctggccaacagggtgaaaccccatgcctattaaaaatacaaaaattattgttaaggtgtgccatgaaggacaggtgtgatttcaacaggtggaggagaaaaaggatatttataaagaaggaacaccaaaggcaaagacagagcagaagtgtctgggttcatttgggattggtgagctaacctatataaattaaggacagagcatgtgtaagaaagttaaggagaactttctggcaaatgagtgccagagttaaggaaaggatggatggatgtgcagtacatgtgcaggacatagataaagagcagctactaaaatacttaattgaggagatgatgcgatgagaactagctcaatgtgaataatgtattctaaaggaaagctatgaagaaagggccatctcttaatattccattctaatcatcaattcaagaaataattgagaatctgagttaagttgggggcaataaaaatgggaaaaaaagaaaacagatttgagtgaaactggggaagaagaatgtacagaacttgtttagcaatgaaagggatggcagctatgaagaaaaaacataaatccaaagaatcactcccaatacctggatgaaaggtgcttctagtaatgacaatagaggagttaagagaaggattttaatggtgagggctctcttatgccaataggttgtaattaaacatttggaaatatagaaaaacagcttagaagaaaataagctaaatatcataatcagagcttcatcttcctagaggtgatacttcaaggaatgttagacagatagagaagacccaccagaaaaaacaaaaggctgagaacagaacattggggatgcctagttttagagggatgagaagcaagagaagtcagaggactcagaatcagagagtcaaggtgttggagctcatggaagccacaggatgtggggattttcaaggcagaatagtcaacaatgcctaatgccacaatagagctggggagaagggggatcaagaatacttcgctgaatttggcaagaattttttactgattatctttgaaggagaaaaaggaataagggaaaatctgtattgcaagtgattaagaattgcagcaccaacacaaaagtaataaatgtagactccacagacgcttaagagaagaaagaaaaactatgagaaaatatagctcaaagagcatacaaatcagggtggagtttctgttatttgggtcttttttttttttttttttttttgacggagtcttgatcagtcacccaggctggagtgcagtggtgcgatctcagctcactgcaagctccacctcccgggttcacgccattctcctcttcagcctcccgagtagctgggactacaggagcctgccaccatgcccggctaatttttttgtatttttagtagagatggggtttcaccatgctagccaggatggtctcgatttcctgacctcgtgatccacccgcctcggcctcccaaagtgctgggattacaggcgtgagccacctcgcccggcctatttgagtattttaatactaaaagaaattctgaatgttggagctggagtaaataccagtttaaactccctcttcattttatacatgaggaaagtgagattcggaaaagaaagtgagctgtccaatactgcatcatcagtgttgatttgagcctaaaatcaaaatgtgaagttcttgtccattacaggtttgaatccaaccaactactcaacaacaacaacaaaatgtattccttgtctgcacctgatatcctatggttggcagactcaaaggcaacccccacgatccctgcaacatagtgtccacacccttgagaaatgccctcttgtgaacatgtgtggagccagtgacttgcttctaatgaacagaatatggtgaaggtggcaagatgtcacctctgtgatgacattatgtagactgtagtgtctgtcttgacaaaagactctctctcttgctcatttggtaaagtagccatgctgccaagatcccaagaccaggaactggaggaagcagccagccaacagccaattaaaaaacaaaacaaaacaaaaagcaaaaaacctgaggttctcagtccaacaggctattccaccaacaatataaatatggaagtgaatctttccccactcaagccttgaagtgagactgcaagcccaatagacactctgtttgcagccttcaaagaaaactatgcagcagagaacccagagaagctgtgcccagaatcttgactcctaaaaatcctgaaataatcagtggatgctgttttaaactactaagtttgcggtaatattgttacacaatagaaaagtaacacaacatgcacgtgtgcatacagtgcagacccaacctgtcactgatacaattggctccaaactttatcgcaaatccattcacatttctttatctccatggtcaccagccaccaaaggaagtagctcttggctccctacactttctgcttcaaccttgaggtgaatttctcatctgcacactgccaggcacaagaaagaaggagcacaagccagctcacccagcccctcctgaggagctgtcctcaccactgcaccaggctatcaaagtctcccgcacctgccccagcagatctgcgcatgcccaatcctgtgtgctttctgtccttacggaatttcatatttctgctgccttctgacggcaatcttttgttccaggattgttacaatttattccttttaaagaaattatcttttctatcatttctaggtctgtggcgagagagtagaaggcagactcctgtgttcggtctgtcattttgatacaatagtctttccagggtaattgtcatgatgtcatgctgtctcaaaaaaaaatccatttacagacattttttactgtaactaaagtctaacagggattttttacaatggttcttgtaagtactatgcagccactacaaattatatgtataaggaatgtttaatggtgttgccaaatgctcatactgtaatgacgttataagacagtatagaaagtatattgaagtttcatcctccttgaggtgaaatgttaagccatgtgaatgaatgatgtacacaagaaaacagaagagggctgagaacagacctcaggaaatctccaggagactgagacagacaaagaattagagagagagaaagctgtagacagagagagacaggcactaaacaagactgcggaagtcctggaaggcttcctagagtcggacccaggtgagctgattctgaaaggtaagtaggaaggatccaatagaagtgatcagagaaataatggaccaaggaatgaagggagtaaaaggaagaaaatgagaaaagcatttagacttggagacactgatgtcacagagcccggcacacagcagaactcaataagcatttttaatacattaataaactggtgctaattgactaattaacaaaatcaaaaaagtggctcaaataaaatcaacattgtagcatttttatagcagccaaacctgcaatgcgaaccctgaactctttgaggaggctggtcctgcagcctaagctggactctctgctgccctcttgtagacagacaccatcaccgcagcgctcgcagcagtcaatgagtcacttgtatgagtcttctaactttgaagctacccgtgctctccatctcaatatcttcacagggtgaatacagactgaggccaacagaaagataccaggaaatggtagctctcaaaaagcattattaaatacatttaactcagctatgtttctgaggccctatccacctgtcagagtaaaggttgtccagaataattatcctgatgatgctttttgctacaccttctctctaaattgctccattccttggttttatcactgagaaacatggcatgagctttaggcaggaactgagagatgtctcttggttcagtctagtccaagaatatgttttcccaattttccaaaaattgggggaaaaaactgattttttttaattcttaaaaaaaaacaaagaacatctttatttctgccttcatttcgttatgtacccagtagtcattcaggagcaggttgttcagtttccaggtagttgagcggctttgagtgagattcttaatcctgagttctagtttgattgcactgtggtctgagagatagtttgttataatttctgttcttttacatttgctgaggagagctttacttccaactatgtggtcaattttggaataggtgtggtgtggtgctgaaaaaaatgtatattctgttgatttggggtggagagttctgtagatgtctattaggtccgcttggtgcagagctgagttcaattcctgggtatccttgttgactttctgtctcgttgatctgtctaatgttgacagtggggtgttaaagtctcccattattaatgtgtgggagtctaagtctctttgtaggtcactcaggacttgctttatgaatctgggtgctcctgtattgggtgcataaatatttaggatagttagctcctcttgttgaattgatccctttaccattatgtaatggccttctttgtctcttttgatctttgttggtttaaagtctgttttatcagagactaggattgcaacccctgcctttttttgttttccattggcttggtagatcttcctccatccttttattttgagcctatgtgtgtctctgcacgtgagatgggtttcctgaatatagcacactgatgggtcttgactctttatccaacttgccagtctgtgtcttttaattgcagaatttagtccatttatatttaaagttaatattgttatgtgtgaatttgatcctgtcattatgatgttagctggtgattttgctcattagttgatgcagtttcttcctagtcttgatggtctttacattttggcatgattttgcagcggctggtaccggttgttcctttccatatttagcgcttccttcaggagctcttttagggcaggcctggtggtgacaaaatctctcagcatttgcttgtctataaagtattttatttctccttcacttatgaagcttagtttggctggatatgaaattctgggttgaaaattcttttctttaagaatgaaggacatgaacagacacttctcaaaagaagacatttatgcagccaaaaaacacatgaagaaatgctcatcatcactggccatcagagaaatgcaaatcaaaaccactatgagatatcatctcacaccagttagaatggcaatcattaaaaagtcaggaaacaacaggtgctggagaggatgtggagaaataggaacacttttacactgttggtgggactgtaaactagttcaaccattgtggaagtcagtgtggcgattcctcagggatctagaactagaaataccatttggcccagccatcccattactgggtatatacccaaaggactataaatcatgctgctataaagacacatgcacacgtatgtttattgcggcactattcacaatagcaaagacttggaaccaacccaaatgtccaacaatgatagactggattaagaaaatgtggcacatatacaccatggaatactatgcagccataaaaaatgatgagttcatgtcctttgtagggacatggatgaaattggaaaccatcattctcagtaaactatcgcaagaacaaaaaaccaaacaccacatattctcactcataggtgggaattgaacaatgagatcacatggacacaggaaggggaatatcacactctggggactgtggtggggtcgggggaggggggagggatagcattgggagatatacctaatgctagatgacacgttagtgggtgcagcgcaccagcatggcacatgtatacatatgtaactaacctgcacattgtgcacatgtaccctaaaacttaagagtacaataaaaaaaaaaaaaaaaattaaaaaaaaaaaaacataaacaacaacaacaacaaaaaaacagagtttctctcttatcgcccaggctggaatacagtggcgctacctcagctcactgtaacctctgcctccagggtttaagcgattcttctgcttcagcctcctgagtagctgggattacaggcaaccaccaccatgcccggctaatttttctatttttagtggagacagggttttgtcatgctgaccaggctggtctcgaactcctgacctcaggtgttacacccgtcttggcctcccaaagtgctgggattacaggggtgagccactgcgcccggccaaaaaacaaacgaacaaaaaaaaaaaaccaaaaaaaaaaatcttttttaaaacccaggttatcggagctcataaatgtgataaaacagcaggccctggatcaccctacagtgattggtcttgcaattctatgcattctttcatatatgaatccatagaacactcttgtccgtgcacaacagctatagagaaaaatcagaactttttctacactcggctagatgctctctgtaaaattaaagtttgagagtcagaaaaatttgaagcaagcttcaaaactaccagtgaacaaatacttaactacagaattatcaaaagatattttttaagttctagttttataattcaagaaaaaaatcattaaatgtatttaatcatgcagtcaaaactgtatattctaaattttaaaaactaaatcaaaagaaaaaggcaatctgaaaacagaaaacaatgtgaaacaaatgaatctaactaaatgtcaagtcagtagcacaactcagaattatttcaagtgactctgaatcacagaatgttggttgggcacacctagaggtaaaataccctcagatgaaaagaaatatttaaaaaccttcaattgtattcagtaatcttattgttcacaatgacatgttttattattttgaactgccataggtaattataagacaatgtaaatgaaaaactaagattttcagcttaagaggaaaaaaagaagtttaaaaatcaaagaagtaaatgtgaatttgaaatatcagaaaagattcactatttatgtttctctttcaaaaaaatacagatcccctggctctgtttattaaaactgtctgtaatgacaactcagtagcaatgtggactcagcatcaagactatgtgctcttaatgtcaatttatatcaataggaaagagctccttaggaaaattactacttccaggtctggaggaagaaatgcatgaaatgagcttgaaccacctgtgcctgaaagcacatgagctgtcaaagacacctgaagtcacagcaaaaggacagaaggcaacctgagagtattcctactggccaaagttggcataacataagcacaaaaataaaaattactacaatgggttgagaaaaagatttgttttaattccatgaattgttaatgatacacaaataagtgaactggtaacatttggaggttttataataaaatttaataaaaataataccactacctatcattgtatttatttcaagagccattgacttctgagagtcccatctcttctcttttttttccctaagtattgacacttcacacaaatatttactagcttctcatcatccataaaataatactgcattggtgcaaaagttattgcagcttttgtcattgaaagtaatggcaaaaaaccacaataacttttgcaccaatcttaacagatgaaaattacataattccacatttttatgctgtacacaggatttgagtctgaatgaaataagtacttgtatcatgtctcaaactaaatatgtaacttctatgaaaacatttagaccatgacaaatattaatgaagagcatgtattaagcaaaattaaatagaagtcaggcatggtggctcatgcctaagatcccagcactttgggaggccgaagcaggaagactgcttgaggccagcagctcgaggttacagtgagctatgaccgcaccactgtactccagcctgggcaacagaaagagattatgtctctaaaatgaataaataagcagaaggatgtacacttacttttacataactaaggagaagaaaatggcaaactatttcggaaggaaatttaggatattagacaccaaaaggagaactctgtaatttattaatgatttttaaatagataaaatggcagttctatgccaaaagagagggcagttaaaccagggcatcaaagaacagtggcccattctgtgggctgtctcatatggagcatgagaaatacaaatcagtggtttacaattaaatggaaggttatatttccttaaaataattcattgccaacagtgaatcaatgaaccataaaagtttttagaaagcttaacagagtttattttacaatggctttatttcaaagatatgaatagaagttaatctaaaaaacagttcccccgctaggctggacgcggtggctcacgcctataatcccagcactttgggaggccgagccaggtggatcacgaggtcaagaggtcgagacaagcctggccaaaatggtgaaaccccgtctctaccaaaaatacaaaaattagccaggtgtggcggcacatgcctgtagtcccagctgctcgagaggctgaggcaggagaatcacttgaacctggaaggtggaggttgcagtgagccaagactgtaccactgcactgcagcctgggcgacagagtgagactgtctccaaaaaaaaaaagttccccagcttcgtcatagcccctgaatcatacaaacctgtcttgcacattaaaatcttcactacttttagtgaaaagtttaacaggaactcaagcataatagagtgacacggtatgttacatctttttaataaaggagaaagatgtatttcattttccaatatcctcagaaactctcttctgcatcttgtctcataatagaaaaaagcaattgacaaaaagataatgttatgctttttatatttttacatgtactctgcaagtcattcattcattttcaaaatactaagaaacactgcaatcttatccttttatttcctttcaaagaaatataaaacttgtaaaacatccttccacataaatgctcgaatttcaaggagttattaacaaatgaaccatcacatctgttcaaacaggaagccaaattttgtgaactctaaatcaatatgcaagaaaaaaagaaagaaaagaaaaattttcttctgtacttttagtaaagaaatatcaaatgccaagatcagaaataacttaaaatcttatgtctttcctaaaatatcacaatggcttctaatatctctctgatttcagactttcctcttcctacccattttgcaattgttcaaatgtgtctttgtaaagccttgcgtcattatgctattggcctgttcaactgctctcatccgttccccattgctactgaagttcaaacttttcaatagaaaataaagccctccacaatctgtccccagccaaactttccaagcatatcatttactccccattcctcttccattctgtgcaacggggaacttcagtgatcaccatttcccacatgtgcattgctatttcctactccaattttctactttttatttcccctacttattggaatgaccccttctctgaaatcgcctctgcctttgagatagcttcatttcagtcatgattcagttacatgtcacctcttctgagaaaataacctgaccaactcatccgaagtggttttgcttacctctgaattccattagcccttgtgagagcaaattagaacccttgttcaagcaaatgtaccctttaagttttttctttactctaattagaccatgagttccttacaacgagaattgcagacatattccttagacctacctaactgtgagtttgccaagctccagtgaaggagcaatatacaacaggaagaaaacagtccatgcacgcaccctgtctagctgtactggatacctccgaatgattactccttggctgagttgagtgacacatatggacgaaactttgggaaactgagaaaattataaattaacttccctaagaacagggataataagacatgttgtagaagaaagaatccagaggagaaggaggcaggctagagaaattatgactgaagaagggagccaggaggaagcagaggaataagacgcagagcaagaaatgaagaggtgaaaacactggccatgagaagaaaccaagtggcaattccatggggagcgaactttggagagggaaagacagatgaaaagaataatttcaggaactttagttgcaaggtatgcatgtcatctccttccctttattctctatcaaatgccttgatgttgaagtttgtggcactttttaagatgtggcaattcgcaagactagctttaagggtagcacatggtaagaacagaactcatacaagggagtcagtttacaatgtatcacaattaattccagaataacactacatttatatttgcatattattttggggtcctggtacacacgcagactctacaaaagctaaatattagaaaattttatataaagttttgattcactcattctctactattaatttctttatctttgcaatatttctttataaaaggacactcatcaggtattattcaagaagcacagtaccttaactgcaggaacaaatgaacacttgcagacaatgttgtatctaatattcagaattctgagaagcatgatccctttgcagaattgagcctggacaaagtctatttccactccagtgggctgcagtttacactaacaaagagcattactttttgactagctgaggaatgaataaaaaatgaataaattaaatttctctgtctctagtcagaattacaattgagattaacagacttttaagtcagcgagttatttccattactatattaataaatttgtgttttgtctgccaagaatatttcaaggccctgtgagtctcccacagaaaactctttttaaaacttaccactagactctataattgcttctcctcttttctcataaaaatgccattctctcagagccaaacagtcccagttaggtatggacagcaggatgtaggggttggggagtgggtggaagacgctgaatacaccaattttgtgaaattaacttatatgaccattgatctttaattggtgaaatttcagtgacagaagggaatcatttgggtggaaatttcatttccagggatctttaagagtgccataaccagccaggcatggtggctcacgccaccatgagccactttgggatgccgaggcaggtggatcacctgaggtcaggagttcaagaccagcctgaccaacatggagaaaccgtctctactaaaaatacaaaattagctggatgtggtggcgcatgcctgtaatcccagctacttgggaggctgaggcaggagaatcatttgaacccgggaggcggaggttgcagtgagctgggattgtgccattgctctccagcctggccaacaagagtgaaactctgtctcaaaaaaaaaaaataaaaaagagtgccataaccacatcctaggtactatttcacctacagtgaagtcaacactgaacaaaaacttttagaagagaaatctgcgtattctatcctctcccccattctccacttccaacagtaactgaattagctaggtcaaaaacttggctgatgaagaatgctgacatttaagatagcatacttgctactacacttcgaagattaaaaatcttgaaactgaagcttggtataagacaataaatccaagatctcacctaatggagctgtgaattaatatgtaccatcacatcttagcaaagacttaatcgtctacataaagtatatgctttcgacactctgctcattattgtcatgtgagagtaaatgctctgaaggagataaatatgaaaatgattccttgagctgcctgcaactgtcaggcccaaggtacaccacttgaaacaatttaaataagtgaaaagatgtgaatgccgcagttgctttaccatctgtgaccatttattagaaaacaaaaacagaaaatctttacctcccttaaacagagcaaacagagaaaaataaataaacaggcaccttttaaaatgtaggaaagctgtccttgagcacttaatatctaaagagataatttctggataaagactagctggattcttaagaactatgcatgtggctaatgtactgacagcatccattaactcaaaattgatctttgaaacttagccagttcgaaaatgttattgcagaaaacacatcaccaaacacattaatctaagaagcgccttgtccatgatctgtgaccccaaggtcatcaaaacccattgtagcccagcaaggaccaaggccccatgagcagcagctaataacatggacattgcattaaagacattactaactgactgatgaattcaaatccatgttcccaactggtcacagggtagaaggaaaagtacaccatctggattgagctgacctagggtcaacgtcctcctaattcggacacgtgctaaccagtttgtaaacctctaatatagaaatattattatttcaaaaggactgtttggaggttaaataagatgataaggatgaaatatgtgtcatgagcattaaaatgcaatttcttcttgtcaaccactcataattaacacaaatactctaacaactaacagtgaattctaaaacccagtgaattaaattccatttgcattatatatttaactgctagggataaaaaaaatgtgtcttgaaatctcacatcaaagagatattgtttagaaaatgagatatggcataatctgaagtgttgctttctgatacattttcatcttgttaaatcagatatgcattatccaaagttaagaaatttaaacatttaaaatcataaaataatacttttaaacatttaaaattatttttcatcaagagatgaaagttgaatcaatgagtaaaattttaataataatatgtataacaactagaaaaaataacaaaatcaatgaaatttttattgagttaggtaagctttaatagtctgtataatgtgaggagactaagagtagaaatgatctttaagggtttgttatttctcgctcttaggttttattaacagattcacaatggagaaaattatactatgcttttgctagacaatagctgcagccacacggtgagatcttggcattgcactttaagaggtaaatttataaatgttgatgtcatgtagaaggacagagtgcttgaaaacacatttatgtacaaaaaggttaaagaaacttgggcttttgagcttagcttttaaaaacacagaagaaataacaattacttccaaatatttgaatagctattaaaattactcacagacactagaattagaaataattgcaggcagctacaggagactatatgtcattcattttctgagaatagtgaatactattaaagaggaggatggacaactattgaatgtcgttgaagagattttaatattaaacggagtaagtaaaaagttacactacatcatatacaaggtccttcacaactcagattttatgattctataactttttttctcttaagctcaatgtaaaacaaatgcaatatatgcagctgaaatctggcaacagtcttatgtgaaccatgtatgcatttttactagcgtagctctacaacttaagggtgaaattggctttggaaccagaaagaaaaaaattgacttcgaaaaaatgtcttctcacaaacttgaaatatgaaaaagtcatcagtttcacacacacacacacgcgcgcgcgcacacacacacacacacaccatgttaaatgttgtttcaggaaatacagaaagaggacccttgctgatgtccactttgtggagtgccaggaaacatccccattgctgactaaaaatatatgattcatttttatgccagtatcatgctgttttggttactatagttttgcagtataatctgaaacctgttagtgtgatgctatctccagctttgttctttttgttctggattgctttagctatttgaggccctttgtcattccataggaattttagaatggcttttttttttctattatccactgtgctatgagagagaacaattatcccctaatcctcctgtgtccttaaagacaaaactttcacttcttggggtggggagtggaggtataggataacgctccacattcattccttcttattatctgatttgatgagagtgggagaaagaactaggcaggttaggttcaatttctcctgggttccctctgagaatatgtatattattctcctttgccacgtggttttctgtctgccctgatgtggtaacttgtggttttctggtgcttacctgtggctgtgccctaagcattatttgggggtgagtgagaagaagcattagagtccaggtgtgaacaggctgcattttcttattcatttctaggtaacaaagctaagacagtttcaatagccatctgctgagaacctatgcttattttttgaaactggctctaactaatgcatgagggaaagacatatgatgaattatttgcttccaaaacatgtacaagttttgcccaaatgacagaaacacttcatgttgtatgcaaattcatgctggcattgtccaagtgagcatgtttatttgggcagaagaaacatccactaaacacaaaaaagcagcaaagagggaatagacacataataaatttagaaagaaacaaaataaatccttattcaacatatagcgatttttgttctttctggactatgcgaagttatatatagtagctattgactacactaagggagaagagttcactttgaatttactataaatagatggatgaaatacagctggttttaaaactttactaaaaccttaccacaaaacaaaatgattttcactgccaatgaacagattctacaagaaatgaaaagaaaatattgcactcaagaagaaaaactaaaacatttttaaataatttattatagagaaaagaaaatgttaaagaatgtatatgttgtaacctccataaaattcaattaaataaaaactctaggaaataaaatataaacataagataaaaaaagacaagatgagataaatagggaaattttctgagatgcaagttgtagtgaaaatgtttcaaataatatagtaaaatattgcaaaacacagtaatagaacatatatatgttcatatatatatatatatatatatttttttttttttttttttgaaatggagtctcactctgtcgccaggctagagtgccgtggtgcaacctctgctcactggaacctccacctcctgggttcaagcgattctcctgcctcagcttcccaggtagctgggattacaggcgtgcgccaccacccccagctaatctttgtatttttagtagagacagggtttcaccatgttggccaggatggtctcgatctcctgaccctgtgatccgcctgcctcagcctcccaaagtgctgggattacaggcgtgagccacctcgtgcctggccagaactttttaatacattgaataaagagtagaattagcatgatagaaataagtctgtaatatgaaaagaacgcttcagaaatctcaaaggcggaggttaaaaaaatgatttaaaaaataagagtagtcagtttctattttcacctggagctaaatggaccacaatggaatagagatgatactaaaataaaatacactaaattttgaaatactggcttcagtattttcaaaactaaaacatttgcttattgcattaaaaagtctaaaacattgatggtaggctcatgcacctgtaagagttatgcaagaatataaatatgtaaatcattggagttaaaacacaaccaagactttggggattacagctaacagaacacatgctctatctaaaagccccccaaaataaaaatttaaaacgaatgtgcaactcagaaagcatgtgtattagctacattgggctctcttccagttggcaacccctggccaaaaactttttgtttgtttgtttgtttgtttttgagatggagtcttgctctgtcaccaggctggagtgcagtggcgcgatcttggctcactgcaacctccacctctgggttcaagcattcctctgcctcaacctcctgagtagctgggactacaggcgcacgccaccatgcctggctgattttttgtattttagtagagacggggtttcaccatgttggccaggatggtctccatctcctgacctcatgatctgcctgcctgggcctcccaaagtgctgggattacaggcgtgagccaccgtgcccagccaaattctcttaatttaaatctctttatcattttctctttcttatatatgtttgtatatgttctattatatatatatgcacgtgtgtgtatatataacaaacaaaaatattgcattcaagaagagaaagcaaagcattttaattaaatgatttattgtagaaaataataaatatatacatatatgtatatatttatacacacacaaataatatatataaccatgtctgcttctcaaaaggtgtgagttaatcacttcatttcaaaaaaatgtatacatgtataaggctcctaaaataccattcgaaaacaagagccatatgctgtagtagatgatggcacatctggaaaccaacttaacggataacactgaagcatagcgctgagcttccgggaagactctttgtaactggacttaagttttggaatcacagaggcaaattctgaaaagatgggtgaaatccaatcagatagcactttatgatttatcaggtgtggtttggccaaaaaagtggaatatgaaaagaattcagaaagtgtttgactttaaataaaatagttgtatccaattaagcggtaaaacaaaaggttggagattgcagacctaatcatatgaaaacaaaattagcagtattaataaacactgaatactatgttggttccaaaaccctttccatttgaagtgaatagacttaaagtccccagtgtcacagagactatcaaagggtttggtgacctcagacctaaaggattcaggtagttagctgacctcttacactctgacccattggccatgaaatttgtagttaaaattttgacaggaacagaacagaaatcttctacatcaaaatctccagtaggccttaaaatgtaaaaatggtgctgggaaaactggctagccatatgtcgagagctgaagctggatcccttccttacaccttatacaaaaattaattcaagatggattaaagacttaaatgttagacctaaaaccataaaaaccctagaagaaaactaggcaataccattcaggacataggcatgggcaaggacttcatgactaaaacaccaaaggcaatggcaacaaaagccaaaatagacaaatgggatctaattaaactaaagagcttctgcatagcaaaagaaactatcatcagagtgaacaggcaacctacagaatgggagaaaatttttacaatctacccatctgacaaagggctaatatccagaatctacaaggaacttaaaaaaatttacaagaaaaaatcaaacaaccccatcaaaaagtgggaaaaggatatgaacagacacttatcaaaagaagacatttatgcagccaaaagacatatgaaaaaatgctcttcatcactggccatcagagaaatgcaaatcaaaaccacaatgagacatcatctcacaccaattagaatggcgatcattaaaaagtcaggaaacaacaggtggtggagaagatgtggagaaataggaatgcttttacctgctggtgggattgtaaactagttcaaccattgtggaagacagtgtggcgattcctcaaggatctagaactagaaataccatttgacccagccatcccattactgggtatatacgcaaaggattataaatcatgctgctacaaagacacatgcacacatatgtttattgcggcactattcacaatagcaaagacttggaaccaacccaaatgtccatcaatgatggacaggattaagaaaatgtggcacatatacaccatggaatactatgcagccatcaaaaaaggatgaattcatgtccttcgtaaggacatggatgaagctggaaaccatcattctcagcaaactatcacaaggacagaaaaccaaacaccgcgtgttctcactcataggtgggaattgaacaatgagaacacatggacacaggaaggggaacatcacacactggggcctctcatggggttgggggagaggggagggatagcattcggagatatacctaatgtaaatgaagagttaatgggtgcagcacaccaacatggcacatgtatacatatgtaacaaacctgcacgttgtgcacatgtaccctacaacttaaagtataataattaaaaaaatgtaagccagttaagctgttgattcaaagaaaagcattgatttcagataccttttcttgggagtgtcaacctcaacattctgatttaaaaaaaaaaaaagaatagaagtttaagtctgactaatactctggcccacatgaacagacaagacatggccccacttgcctttcttgggcctccagcagaggtcatagccatttccattccttaccatgacagtctgggggcaggatccgatattgtgagacccaaccctgtgcctaatcagaccatggcaagagcccaaaacggacatacactcactggaattttttaaatgtcacagagagcctgggtgagtgaccgtggtcacaattaaaaacactcctacaaaattttagtccaaggctccttatcacatatttcagattatattcatcaaaactgagcacacctagaaaacaaaatctactgaatgaagccactaaaataaataaaaatatgtgatcatcttgttgactttggtgacatcattatacttatttaataagtagaacaaaaataaagaaggtagcatgttcagaatttccttctagaaaagtgaactcaagagtcaacgtcaacagagctcagtctcgagtaaataaaatctggaattttgacagctacagatggtgactgttgtattggaaagaccaaggcaacaatttgtcattagctaagaaatgattgtcagagcctagaaaaacaaaacaattgtataaatctgcataaatccataatccctggattttaaagtgtgtggctttggttaatgctgtaggctcaagttcagctgaatcttcaaccttcagtagctgctacatccccatccagtgccaaatccccttgacttagcactgctatcatttctatttcctctggtaccacagtttacctagccaaggtcccagccactggagctaacgctgccaaacccaaaactatagcccaaggaagaagagttgaaagcctgcaaagtcaaaatggccaggcctatatgcatccccatagagaaaacccaagctgagagccaaagagagaatggtaccatagaagcagtaatagaagttcccagaagatgaagtttgactcattgtgtccagatttgtaaatgaggtttattgagcaaggaagttgccagagcttgatgcctcttctcacaggcactagaggatagggcttcaccaagagccgttctttcttaacatccacatctgtttatttggaagattgtcctgttaaaagacaggcaaatacatgtatgtatgtatgtatgtatatacaaagtgagtttatatgaatacacagcatgctagtgttccaattactgacagtaaattagaaatgcccctttaaaaggcaatgtaggccaggtacagtggctcaagcttgaaatcccagcactttgggaggccaagaaggccggatcacctgaggtcaggagttcgagaccagcctggccaacatggtgaaaccctgtctctactaaaaatataaaaattagccgggtatggtggcatgcgcctgcaatcccagctatttggcagactgaggcaggagaatcacttgaacccaggaggcggaggttgcagtgagccgagattgtgtcactgcactccagcctggacgacagagtgagactttgtctcaaacaaataaaatacaaaagtaaaataaataaacggcaatgtataatgactggatggggcatggagggctttttggaagtggtcatgctgtgatacgtacactttgaaaaatagatcgtgttgccatactcgtgtactttctttttactttctttttgtatttcaatgaaatttgcatttaaaaagtcaatgggcaggtacaaaattgcaatcctttcctcactggagtaattttggtggatcaagtgcattcttactcattaacttctattagcatttatataatatgtttggcatatatctccctgtacttaaggcttctcctataactaatggtttcaaattaacatctgactgcaacatttggcaaaatgactcccgactgcatatgttttttgtctataaaggtcagataccacaacacattgcacaaggaataaacaatatatcaaggtgattgagagtctgagctctgaaaccaggctgcctgggttgaatctaactctctcaactactttgtcggtgggtttgagaaaatttatcctctttgcaactttttaatttgcataatagtaataataatagtgctacttcctaaggtaggattgttgtgaggattatatttattaattcataaaagctcttagaactgtgccagctcatggtaaattttaagtatgacttcaaaagttggaagtttattttcttttatacagaggtaggcaaggtgggtagacagttctaccatctcagtacatagattccatgtggaggtctgagtcagctgctcctaaattttgccacattataacagacaagaaagttgccaagaggaatacacaaccagctcttttaagaattaaagcagggtgggaggagggtgcggattgaagatcaacccatcgtgtactatgctgagggactagatcgtgagacttctcagcctacataattacaagagccaatccctcataataaatctctttttgtatatctatactatatctatgtttatatcataatggtctgtttctctgaagaatgctgactatatagaaactggtgctgagaaatcggtgttgctataacaaatacctaaaaatgtggaagcagctttagaactcagtaagggataaaggctggaagagttctgaggtccattctagacaaagtctacattgctgttgtgagtggacaaaatacaaactgctctcacacacaacaatcaatacataagacttctatcaccaaatgtgtggagacctcccccaactaataagaaagcaatcagttcttcagtggacaccagctgagtatcctccaattcagttctgatattgtctacctagagatagcatcagatcctgcaggttaagggctcagtcccacaaggccatctcctacttccaacgccaattgcaagctccaggttatcttccctgtggttctgaccaaccagcgataccttggggttcccatgattccctccttgggtttaattaatatgctaaggcagctcacagaactcatagaaacacttatgtttactgatttactacaaaggatacagatgaagcgatgcatagggaaagttataggggaaggagtgcatcgtttttatcccctccccaggcactctaccctccaggaagcttcagatgttcagctattcagaagctctccatacagccttctttacaacctcttgggcctttcatgaaaacttcattggctaggcataattgaagcatggacgaccatgtagaaatgtgactggactaaaaagctataacctagtactaatagactgagtagggaaatccagcaaggcctgcctgctcatattttcattggcttttcctctttgtgcagcattccttcccgcagggtatgagcccaagcacctcctgaaattagggtcttatgacctacaatcagacaaggtaggtcagagaatttctttataacctgttccaagatagaaaagtggggaaagattagagtatatttttagttttatggccagccttggggaaaaataataagagctattggagttatgagccaggaaccatgaacaaaaactatgtctatataaaatcacagctgtgaatagacctataaagcaattatggtgaggacttgggaataaaagaggagacttcagtcttcttaggtgatgtacaaataatcctgaagagaatgttggtagaaatatggatggtaaaggctatttgaaggagatctcagatgaaaatgagcacacgttattggacaatgtagaaatggtgatccttcttataaaatgccaaagaatttgcctgaatttgtccatgttctagtgttttgtgaaaggcagaacatgtgagcaattagttgaatatttagttgatgctatttctaaacaaattgttaaaagcacagcttgacttctgacttcctatagtaaaatatgggaagagagaaatttcctaaagatgtcattgttaagcaaaaaggaagcaggtcttaaagatttgaaaactctcagcctatccatattgcaaaaaaaaatgagaaagtgtattcaagagagaacactaagggtgtggccaagagtccctttgataaggagattaatatgggtgtaaaacatgaacttaataagccattacagctggatgccagcttgaacagaaggggaagaagatggaaagaaataaaagaaggctctcagacttcttggattttataggacagaactgtagagtcattcagctgagaatgtgcactattctttaagaaaaggggagcatgaccccaaagatgattcaggatcatcagggctgccttttcattttcaaaatgggggaccattaccttgttttcaacaggccagacagcctctgcctgcagccagggggatagggtcacccaaagccatttgggagaggccaaccagacctgtgggcatgggacctcccagtagagccctagggctgcaaaccctgccaggtagagctggaggtaaggggtcaggacttccaccacaatgggtctagaagatggaaccactgcctcagtaggtctagaaggcagcactcttccccagtgggcctggagcacagagcatcaagccgaagaggattattctcaagccctgagatcttgtgccattttccttgtagtttggacttacacaggaccttttaccccttttgactttttctgtttcttctttctggaatggaaatgtctgtcctatacctatctcaccactatattttggaagcacacaccttatttagtttcacaggctcacacctggagaacaatttgtgccacaatgaatcacaccttgagtcttacccatatctgatttagatgatgtttagatgagctgttggcttttagactttagagttgatgctggaccaagttaagacttttgaggactgttaggatggaattaatttattttgcatgcaagaaagacctgaatttgggggcagggggagggttagcatactagactaaatctttgtgtctctccaaaattcatatgctgaaatcctaacctccaatgtgatggtattaggaggtggggtatttgagaggtgattaggtcatgaaggtgaagctcccatgaatgagattagtgccctcataaaaaaagactccagaaagcttccttgccattttccaccatgtgaggataacgtgagatgcaccatctatgatgaggaagcagtccctcaccagacaccaaatctgctggtgccttgatcttggaactctcatcctacagaagtatgagtaataaatttctgttgtttataagacacttagtctgtgatattgttatagcatcccaaaaggactaaaacaatctctcagaaaggtttaaaaacattccatccatgaaataagaggaggatgttattaaaaggggaaagccataaaataaaattttaaaactcttaaaaataaatgattgttgaaattcaaaacttcagcaacacattgaaaagataaagtcagatgatttttccacatattacaacaaaaatataaaggaatagaaaatgtaaaaaaatgataaaacattaggatcgttctgagagatccaaaatataaccaataaatttttgaaaacaggtgatgatcagatgcatcttatcaaagaaataatagaagagaattttctataaatgaatggacgaaaatcaggaaagaatgttccataatattctgattaaaatgatccattgagtatctaaaacggtgactaaagagagatttatatctactgtttcagttgtctactgctgtataacaaatcacccaatagtcagtggcataaaactacaactactttattataatcatggattttgtggatgaggaattcatatagaagacagtgaggatggctttactcttttccatgatgttttggttctaaactgggaagacttgaatggctgggagtgatccaaacagctagagagtagaatcctcttgaggcttctccactcatgtttctggtacttgggctgggctgatcttaaagactaagttcggcccaaggctgtcaacctgatcacctacacatgacttctatacagggccatggctttttacaacaaggcagctaggctctgagaacaacatggagcttccagagagctagagttccacaagaaccaggtggaaggggcaaggtctttcatgacttaacctcggaagtcacctagtgtcatcttctataaactttatttgttgaggcagtctttgactttatttgtgacaagcagtgacaagtccaaattcaataggagagaatataaactccacctctcaataagagaagtatcaaagaacttagaggtcatgttttaaaattgcaactcttacatacatcactatgaaatttcataatgccaaggataaaaagaagatccaatacttccaggaaagaaggggaaaatgaccacaaaggaaagacagtctgctattgcaatcgactaatattgcattaaataaacaaacagctaaagacagagaaggaaaactgtctatatagtggtagaaaattattttcaacctcatattctatatctagtccatcattcaagtttgagaaataataagacattctcagatgcatccacccgaattcagaaaacttacagtctacacatccttaggaattaccataagaattgctccaagaaaacaaaggatttaaacaaagcctggaagacacagtgtctaagttcattttatgttgctgtaacagaataccatagactgggaaatttatcaagaaaagagatgtatttggctcatggttctggaggctgtgaagtccatgattgaagggtcacatctgggaagtgacttcgtgctgcctcagacacggcaaaaggtatcacatggcaaaagaggacaagacaggctgaaagttcatgagataaagagagaaaatgagagctgaacttcttcttttatcaggagcccatgccagtgataactaaatgcggcccaagacaaattcataaactttcttaaaacattatgagatttcttttgcaacttttttttaactcatcaactatcattagtattagtgtgttttctgtgtggcccaagaaaatttttcttctttcagcgtggcccagggaagcgaaaagattgaacatccctgccctaaaccttttctaataatattaccactttgaaaacagcacagagaaacagatttgagcttcacactccgatctccttgttgagtcaacttgcaatacaaagctttttttttcttccaaaattccagtgtcatagtattggcttctagtgcattggacagtgagctccttttgttctgcaatagagcctggaaagaatgtagccttgccagtgggcaccattacccctgttccacgtaacaatcactacaataaacaatggcctgcatgatgtaacttggcttttaaaaaagaataagatgatgtctttattttataaaactaaatgcatgacatataaatacagacagatgtttttctttttctcttccagagcacatagggtcacacacctgtgggaagatgaagttaagcaggagtaggaggagtttacagtaggagtttacaatagtattttggccagagctgtagtgccattggtaagaacagtcacagaaacaccaggaaacatgaaggacatgcacatcatcccccatgacttctccttcagaaggttccagacacttcttatcttcaaaggagcttattttactctttgtgtcaacaaagaccacaactagcttattaaaaactttctcttatgaggcttaaagttcttttctaaccaaaatgttcatttgagtatctcaaatgcttgttcttatttttagtatttgaggattccatgaggaaagtgagatttttttccggcgcttattccttaaatgcttttcatctttgctggtatttcctcctaaccttcacctttccagagagaaaatccgtaatgctttttcttcttctccttcttcttcttctccttcttcttcttcagaagctagctttctccttgaataatttagttacacttcatgtttacctcctcttacatcttaaaatgcaatgatatctgtaaataatggttcaaaaaagaaagaaacaaacaaagtcaaactaacacaatgtcttattcttgaggcatgtgaataaatactccagttagggatttgaggtggctttagcgtagctgacagaggaaaagattcacttaggccacacctccttaacctgtccctaggcctcccttctctaatctcacactcctcactaagatcaggataaaacctgaaatatcaatatgaggaccatactattgaatggctagaaactgttcttcatctctccacctctggcgttcactatgtttcagcagaaaaaaaaaaataaaggtcaaaaggactgttaggtagaattgaatagaagagaaatttattgaatcagaataaaataagggtggattttaaagtgaaaatttacattttatgatgaatacttgaaagtattgtgttaatagaaatatattaggttagtaaattcagaaggttttccatctttttaggaatagtaaatgacacaagatgaaggagctgctgttttcattcttgtgaatgaagaaaatgttaacttttgatgaagtggagcaaaggcaacatcccatattaaagttactacaataagaaaattttgtggttaattaagcacattgccttgctacctctacattgggaaagagactgaaaaaaaaagttgggaaaagtttctgaagtaagatcagaactgtggattgtgaatttaaaagactgaactgaatggattgtaaattaaaaagactgaactgaaccagccagatctagaattttggagtagcctctgtaaataaataaaataatcattaacacacacagaccctttattcaacctggtatcattttttgcatggaaaataaacccagactagacatgaattcattctctcagagctttataaattgacttgggctgtgaatgacgtggttgcttgttaccataattgtacttagtgtcccttaatgccaccagagaggaacaagttcactgagggatcagcacagatggaagaagaagttctaactgtcattgaaacgtgtctgagctcacaatgtgtatcacattaatagctagtgtgctgagctaatacaatcttgtactatcccaatagaaattcaatgtcaagttttagcttttcatctgtactgagaccagagataatcctatgagtgttgcagtattattttttttctaatgattaggttgctaagccattatgattttaaatggattctatttttcaattaaatatagttgtattttgccaattacatttttaaaaaaagaaaatttcttctcagtttctgaagttgtaaaaaagtagttgaataataatacttcaactattttgacagaaagttaaacactactactacttttttttttttttttttttttttttttggagacacagtttcactcttgttgcccaggctggagtgcaatggtgtgatttcagctcactgcaacctccacctcccgggttcaatcaagtctcctgcctcagtctccccagtagctgggattacaggcatgcaccaccacagtcggctaattttttatttttagtagaaacggggtttctccatgttggtcaggcttgtctcaaactcccaacctcaggtgatctgcccgcctcagcctcccaaagtgctgggattacaggcgtgagccaccatgcctggcccagtcctacttctttatgtgtgatgtaattatggttgaaataacaattaaaagaaccaaatgctaaacttttcctaggtggtccttgcaatttgcttatttaattggtttgttataagtactgtcctctcagtggttccaaggttgtacatgatgtttaaccttggatgtaatgctttccaaacaaatcagactagaatgatcaagggagatggagtgggttatagcagccccagcaatacgtatccaaatcctaacccctgtactcatgaatatggcctttttggaaatagggtctttgcaggtgtcgctaaggatattgagatgatatcatcctggatttagaatcagccctaaattcgatgatgtgtatctttataaagacagaaaaagaagagacaaagagatacaagacaaggccatgtgaagacagaggtagagattggagtgatgctgccacaaggcagataccacctaaagcccccagaagatgaaagaggcatggaaagattctcccctacatcattctaaggtagtgtggccctgtctacactttgatttcagaattctggccccacaacttcgagagaataaattttgttgttttaagccatgcagtcagtagtggtttattacagcagacctaggacactgatacagaaggcatcatggaaatacagcatctcaatgccactttgaagaatgggaggaaactcagcaggaaagggaataagaaaatatgtttaggtatgaaaatccaggacattcatagataaactctgattttgaatgaattgttctgttcctacaaacaaatggtcatatatagattggaaaagtaattgtggcctggtagggcattgattgtcagccatatatatatatacacatatatatatatacacacatatatacacacatatatatacatatatatacatatatatacatatatatacatatatacacatatatatacatatatatacatatatatacatatatacacacacatacacacacacaatactttattaggcaacaatagtactttacaggtctgttttgtttcaaagtttacaaaaggtcttcacatattatctcatttaaatcccacagcaaacttatgaattaggcagcaagggtattattatataaatgttataggtagaagtggattcccctccagttgttaagtaacctcctcaaggttgtgcacctcataagtggctcccaagaatacgaattttttacctgaaatccaacattctgttcattacatcttgatgattttagtaaatgataatgaccttaaaaagtatgattatgagatcacgatggcgtagtaagaatattaatttggataagaggttatagttaggtaaccctattagccagctattataagagtcaggtatgaaagaatcaaggcctaggtcaagctggtctcaatgcaggcacataagagcacatgaggaaaatgctgatgaaaaagcgtcaaactatgttaaactgtgtccaccatgccttaccaattttgtcatattttcttaaatcctttcctactttgaattttctataaacattcattgcattcctatatactgagatatattatactttttctggcttctccatttagcataactttctgcatgctttggtacatctttttttctacaaaagaactagcaacaactgagaacctcgtctttgcatcaggtaggatttatcctacatgaaatctaacaaaaagattccagaattaaaattggttaaacacacacacacacacacacacacacacacacacacacacaattggattaatcacctaaacatattgtactcaaatgagttcagataaaatcctctgatgacataaaccacttacattgaaagagactataagaaactgttattggcttggcagatggagggagcagatatactaagattgaactccaaaatctgaaaaattctttcttatacaattaaaattttaaaatagcaagattggatataccttgatagctaaaaaaaaaaatagtttagctaacatagctacattttaacaaatattacccatgtcagattgagtgtatatatatatatatatatatacacacacatatatattttttatatatgttatatatattataatatatgtattatatatagtatatacatcagcacattgagactgaaatagaacatacaggaaagaaaccagcttaactttccttcactcagcatttttcacatatattttacctggaatttttttgatggggagataaaagagaaaggaggagtatttctttttgataatccacggaattagagctccagataatgctgctctaatatgtttagtcaacgtgcctgctgtggaataacagcatttttcacatatattttacctggaatttttttgatggggagataaaagagaaaggaggagtatttctttttgataatccacggaattagagctccagataatgctgctctaatatgtttagtcaacgtgcctgctgtggaataactattttcctttgtgcaagtggcagcagttagaagcaaaatactaaacaattcaaataaatgacaagatgtgccaaccttgtcgactgaattggtgtcattacttttttcaagaaatataagattatgcacagaaactgagaaagtaaaaagaaaagatgaaaagggaagagaaaaaaatgctgatattttttaaaaagtatttggaaaactagttttatctttcaatattatgcaaactatgttctggatgaaaaacatctaggttcttcgcactgaagaaaaaaacgcaagaaacaatattgcagaaatatagatctcaaggtacagccaaagaagattgtgaagattccagatctacttgcaaactcttccatagctgctcatttcaaaagaaagtgtgatgaccagtcaacacaatgtagcatgttctctggtccataacttccagacccaaagctgcagacctcggaagctgagggaagagggtcctagtgatgactcagaatggaatacattgcgcccatatatttttctataataaaactgcaacaccaaggttttgggaaggttatcagtcccctaagagtacaaaagcccagcctggccaacatggtgaaaccccgtctctactaaaaaactacaaaattagctgggtgtggtggcatgagcctgttatccagctacttgggaggctgaggcgggagaattgcttgaaccctggaggtggaggttgcaatgagctgagatcacagcattgctttcctacctgggcaaaaagagtgaaactctgtcttaaaaaaaaaaaaaaaaaaaaaaaggtacaaaagaagcatgttcccagagaaagagttgtgattctctcagtcaggagagaaagataaagtgtgaagggaagaacaaattcctggagtttgatgtcaccttcctcctagagacatctgtatctttcccctcattaaaaagtgtgtccccacctaacgaccttcctttgtagtgtgcatactaattgactgaaaaatccctttctataatcttaagtagcaatatttcctagttcagtaggaaatttacttaattttgtggaggaattaaagcaacaaattataaggcacatacactgttttcaaagagtgggtttggctatgaaacccattcacctttgttatttctcaagggactgctctttatgcaacaactgtattactttgtcttttgtgaaggctactgtcaagccattgtcagcctagtatttcacagtatccaaaacacacgaatgatttgtgagggaaatcgtgtcaatgtatttctagatgcagcaagtgatcaatagaaatacatagaacttggtcatgagacagtctccacataaatctcagtgtgtttaatcaaacctatccattaacccacagaaaaattcatgttggaatagtgcagcatatacatccaaagacccaattgctcacctgatcgtacccacctggatgttctgcctaggtctcaaatgcagtaagctctaaacaaaaatcatcatccatcgcccaccacctgtatcctttgactgtgttccttctcttgataaaggacacactatccaccctgtcttccagaatagaaatttcaaaaccatctttaagtgccaattcttttggcagtcccccttcacctccaatatcactgggacctctggccatcaagaaaacacaactctaaacaccctctcatgacaatttattagttacattaaaaagaactaaactcatcacatgacattcaaaatacccaacatagagattattgatttacactttgtcttcctcccttaatattcacccactatgttgggtgcagtggctcatgcctgtaattctagcactttgggaagctgaggccagtggatcatgtgagtccaggagtttgagaccagcctgggcaacatagtgaaaccccatctctagaaaaatgagctgggcatggtggtgtgcacccgtaatcccagctacttggcaggctgaagtgggagaattgcttgaacctgggagtttcaggctgcagtgagctgtgatcaggccactgcactcctgcagcctaagtgacagagggagaccctatatatatatatgcatatgtttgggatttatatatatatcccaaatatatatatttattatgcatatatatatgtacatatacacacacacatatatatttgaatatatatacatatatgtgtatatatatatatatatatatatatatttgaatcagagcagaatttgattagccagcctgtttgacactttatatcacagaatgtagacgataaaataatgtaatgatccttcaggattatgctgcattggctcttgcacaagtcacatggatatttccatctttcttctgtatatatccatatatacagggtctccctctgtcacttaggctgcaggatgtgtgtgtgtgtgtatatatatatatatatatatatatatatacactcacaataacattattatgaagccacactgactccaaatacactaagcattgttggagccacaccaaacctcactgttttctgaacacagtgtaagctttcatgaccccacagtttggggcttgctgtttcatctatgggaatctaccctcccttttcttccctcattctgccccatccaacatcattactcctccctttacctcgtgggcctcgtgatctcatctattctttaagacccagttcaaattattttctttaggaaatcttcccagaagtctccaccccagagaaaaatcaatcctcctaactttatagatccacagcactttacatatgcttctctattgtggtacttacttcgtgttaactggttacttacatatctgcttccttactatattagaaactccaaagagacatcgtccaattactatcagatattcaataaatattcaccagatgaatgaatcattagctgaacaattggtttaaatagtaaagttattctagtactctgtgatttttaatgtgtaaatgacatctcagagttactgaaaactcccttttcaatacgtctcctgaggtcatcttatgcatttcttctgtgggagatatgcaaatttagaaactgaaataagaaaataaagccatcaaataagaaataaaaaaaggaaaggagaaggaggagaatctaatcataaaccatcaattttccctatgaccctaaagagaccagtcagcagctttgaaaaatcattcacttgatagattgtgctcagaagtaagttctttggaaaaaaaaagaattagaaaaatattctaaaatgccaaaggtttttggggttttgcagttggtttatttggcattagactgtcacatctcactttgaaaggacagagtcacccatcagaacattacacaactcagtcagctgtatttgctcctaagtgtattttgcattttcaattacagttgcaccagagatacagccaacctcaaagaatttcactgagagccactcacataaaacatggcctcgacatgttaatttagcagcacacatggaacaccggagagcctggcagccttaactttgtatcagggcagaatttgatcagccagcctgtctgaccctttatatcacagaatatagatgataaaataatgttatgatccttaaggattatgctacactggctactgcacaagtcacatggatatttccatcttccttcttaagattcatgtgtcttggtcttctcacccatatctcacattagaaaaagagtggaatccatctcgcgggccggtttctccgaggcacctggaactcctcttccccagtcttttccaaaatgcctttcacagaatgatagtctcactagaagctccagataaatgggttccatagttctaatgtgtgtgtgtatatatatatatacacattagatatacacatatatagatatatacatacacacacacacacacacacacacacacacactgaatagtatgtccagccagagattcatagtacttagtaacaatattaaatatctgagatgactaaggaaacaaatcatgttaaattaactggatctgaatttctcaaacatctgccctactgaacacttttttctgtgccactgttaatattacatcaaaaaagatgtttacagaaatttacaaataaaatacaggattccagtgacatctgaggttcagataacaaaaatgttttagtatgagtatatcccaaatacttgtcccaaatgggatatctatactaaaaaaaacaaaaacaaaaaaaaaaaaaaaaaaaaaaaaaaattcaacagtgagaatttgacatggcagagggatggtgagatcttgtgaagatgtcctgaggtgataaagaaaagaagcaataggatcctgagataggagatggcagactcatcaactagcaccacctatcagtttgcaggtgctcatcgctatgccagctcagccttcctgtgccatcataagcccccaaggattgcggaggtcacatcaaacagaacaggacggacatcaggagtgggccaggtctttgtggtttgagagccagctgagtcttctagagtaaaaacagaagtttcctgcatagatttatgtgcaggatatctgatacgtgttatgagcaggatatcttctttttttacggtagtaaattttttttattatactttaacttctagggtagatgtgcataacgtgcgggtttattacataggtatacatgtgccatgttggtttgctgcacccatcaactcatcatttacattagatatttctcctaatgctatccctcccacaaccccccaccccctgacaggccctggtgggtgatgttccccacactgtgtccatgtgttctcattgttcaattcccatctatgagtgagaacatgtggtgtttggttttctgtccttgttatagtttgctgagaatcatggtttccagcttcatccatgtccctgcaaagaacatgaactcatccttttttatggctgcatagtattccgtggtgtatatgtgccacattttattcatccagtctatcattgacggacatttgtgttggttccaagtctttgctattgtgaatagtgccgcaataaacatacgtgtgcatgtgtctttatagtagcatgatttataatcctttgggtatatacccagtaatgggaccgctgggtcaaatggtatttctagttctagatccttgaggaatcgccacaccgtcttccacaatggttgaaataatttacactcccaccaacagtgtaaaagcattcctatttctccacatcctctccagcacctgttgtttcctgactttttaatgatcgccattctaactggtgtgagatggtatctcattatggttttgatttgcatttatgagcaggatatcttctatctgttgtttatatcttagcaacagttataagactctgagtaacatttgaatttcagaaaaaataaaaaatttttttttgctaaatgaaacaggtatagaggcccttgtcatagagcatagaatctaacaggaaatagagcacccctggacaatctacttacatagtaactcattcggaaatgtatttttactataaatatgaaggcaacactattcagccacaaaatctgaatagtgttgccttcatatttatagtaaaaatccctcaaccagaagtcacttattggttctatcactgtctttttttttttttttgagatggcatcttgctctgttgcccagctagagtgcagtagcacgatctcaactcactgccacctccacctcccgggttcaagcgattctcctgcctcagcctcctgagtagctggaactacaggcacccaccaccacacctagctaatttttgtatttttagtagagacagcatttcaccatattggccaggctggtctcaaactcctgacctcgtgatctgcccgcctcggcctcccaaagtgctgggattacaggaatgagccaccgcgcccagcctgtcattttttattggacaacaaaatcactccctccctacttcctcatccattaaatgagggagttgtattaaattagttctaaggtgtcgtccagcactaacatcttacaaaaactattgttacacaatgagaataagggacagaactagataatgtaagatgatacatgtggtttatgcataataaaaagaaatagaaaaattaagttccttagtttcatttatggagctattttctggtcaattcctattttatttcaagagagaaatatctaaattatttccaattattgtagacattaccagaattagctccttttaaataagcactaattgctaaagtctcaattttagactggaagtatgttccctgggatttaaaaaataatgcctcctagaaagatggatccttaactgctgtacgcaatccctgaatttattagattagtgcccaaatgaaacccttcctgtgaattcttgtttcctaaaacagggctcctttggtgggcagatgaaaatagaaatctagttcagatttagccaacacttttagagtgcctactgtgagtcagactttaatttcacactctttcattctcacagtcacattataagggatggtagacacaaactaactcttcaccaaacccattttctcttcttcctttgcccacatcaagaccatatgaaccagactcctttcaagagtagacataagaatggaaacttgccaatgaaatgtgagcagaagtcgtaggggtcacttccaaggcacctcacagaaatttcctatgtgtagtccccctgctctttgaccttctgcagccacattggaagccatgagttgaagctacaagaggcacaagacagaaagtgcctatgtcttcaaatcatattgaagaagagctacccactaactggaatacccattgaaggcttgaaatgagcaggaaataaattcccattgggtgaagccactaggactacacagtttatctttttgttgttgttgttaacaactttgtgtattcattttattatatacctacatttacaaaattgtaacaatgtggcatattgtcttatgtaattgcatgacaagaatatttccagatccttagtattgttttaatggctacatttgtatagacattgccatgatttatttaaccactctactactggcaagatacttatgtgttttctaatttttgatataagaagaagcatataataaaatatctcattataattaattatgcacatttatgactatttctcatgaattaagttcataggaatagaagtaatggcgcagtgcataaactcactctctctctctcatggtagcaatgcttagaatccaaagtgcatgttcctttcatcccggaaatttacacagtctgtcttttataacagtgagcctcaaccttagctaatacttgaagttagcattactatcctcatttacacaggaggagacagtgactgagagatcaaacaactgaacttactgtcaatatgctagaactgaattcaataccagacctctcattccaagtcctgtgacttttctaaaacaatgttttccctcttctaaagtttctgatttctacaagaatactacatatgctttgcagatcatttgcaggcttttcttgaaagagaaatatttttcaagctctttccagaatcatatacagagataagggaagagtcaatgaattattatcttggcaacagctaacgaaaagattaaattctttcctcgttttaatcaaatcaatttgaaaaggaatgcaacccttaatcccaggatttataactataacttttgttcatggagtaagctttgggggtaaattcacttcattttccagtgaactttatttccatattttatcatttaccatggaaaaagaaagatgaacagactattgaatctgttgtttaggccacccagtttgtagcactttgttatggcagccccagcaaactaatccagatagttctgctagggatatgcagagaggatgaggcagaaaagaggaacactgggatcagttaggggcttattatggaccccagtataaggcaatggctgcccaccatagctagaggcggaggaaatgctaagaaaatcaccaaaagaattgttatggctactaagaaggaacaatagctcttggtgtttaattaaatatgtcaagttaggggaaaagaggagaaaaactaataacaagatttcaattataggtgacatagaagatggcagcaccattaaccaagaggcaaaaattagtatgatgagagtttttagcaaaagaatatttgatttttgtgaaaatcttctctgccattgcaattgatgtgttccaaagaatatttgcatagtcattttaaaagtgttttcaataaagagaaaggtggtttaggggctagagtttcaggcccaaaactgtaaagtctttctcatgaagaaattttaataacttgttttggtggtaagtatatagctgagaaatctatatatcactaaacaaattctaccctagaccacatccagttctggattaagagtaatcacctgtctgggagggtcgctttagcctgggaggttgaggctacagtgagccataatcgcaccactgcactccagcctgggttacagaataagactctgtcctaaaaataaaaataaaaagagtaatcacctgtctttcttacaggaaccagcaactatcattaacataattattacatattcttatcgtatcatctgttttaataatagggcacagaacaacttacacaaagcaatcatatttgcttataatagctttttacttgtgctaataggtactggttcccaatcataattgtttcatacaaatcatgtctaattaatataatagattatattataacaatttgagttttgaaaatttctttgaatattagccaggcacagtggctcatgcttgtaatcccagcactttgggaggctaaggtgggcagatcacctgaggtcagttcgagaccagcctggccaacatggtgaaaacctgtctctactaaaaatatactcacaagaaaaattagctgggtgtggtggcgggtgcctgtaatctcagctacttgggaggctgaggggggagaattgcttgaacccaggtggcggaggttgcagtgagccaagatcacgccactgcactccagcctgggcaacagagtgagactccatctcaaaaaaaaaaaaaaaaagaaaatgtctttgagtattactctaggcatctctctgaacatgcccatcaggcagttaaacataggaaagcacagtttacaaaagagattgcagcgagagatcctaataagtaaagctttcagacttataaaggcaaacacaaagtctttcaaataggaagccatttacaaactcgtaagcacaggtaggagttttcagaaaatctaaaaagaccaagcctaggtctttaacaaggttaaagtcgaagatcagagcccacctttatctatctacatggatagctttaaagggactgttccggcctgtgtcccaatgtgtcgagtattcattcctgctatttgaccaaatctcaataccttcctttgagtcttacaagctttagatctctcagatttaaagtcagatattccaaaggtaggttatactttcagctttcaacatagtttcattataagcaagcaacatataagtaaaaggatagaatatccatccatccttcactgataacttgcatgatgtagcatcttggtaagcctttatatgcattggaggagaaaagtaaggcatttggaagtaaaatgtgaagccctaaggggagcaaagcatataggagaagatattgaagaatcagtgagtttgtccttcacaacccaactatgagcttcaggagagcaggaatagtaatggctttgttttccactgcataaccagcacctcgcatagaaagttgaaacattagaggtattctttatttatttatttatttattttattttatttatttatttttttttttgagacagactctcgctctgtcgccaggctggagtgcagtggcgcaatctcggctcactacaacctccgcctccaggttcaagcaattctcccgcctcaacctctcgagtagctgggactacaggcaagcaccaccacgcctggctaatttttttgtatttttagtagagacggggtttcactatgttggccaggatggtctcgatctcctgatttcgtgatccacctgccttggcctcccaaagtgctgggataacaggaacattagaggtattctaatgtttgttgacagaaagtcagaagggagagagggaggaaaggagatgaagagggaaaagagcaaaaggagatggtgagggaaggtggcaggaagggaagaagggagggaggaaatgaagggagaaaaagagggagaaatttgattttgagctgggacattgagataatgtcccgaagacaatggccaagagatttcagtctggaatggagaaaagttctggaaatagtgacatgatattgtgaatttacttaatgccactgaattgtacacttgaaaatacttaaaatgacaacttttatgctacatatatattttaccatgataaaaaaaattttaattagatttaagttgttatcatcactagagtataaatgttctctgtgtcctcaaactttctataaagtgttagaaacacaaatgccttgtgtaagtggatcttagtgaaaatcatggaaaggaagtgtaaatatctgaatcacggtagtctaaacagaagccaaccataacataggaagaaaattcatgaaatgaactaattcttctcaagtagaagctcagagcccaagaaggtaagaaaaaagttagacatctttccccaacctgtctactctcagattcctcggagatgttgggagcagccaagacttccaccaaacagcaaaaggagataagagagctatttttgtttcaatgttaaatgacaggatggctcagctgatacttgggttacatgtgtattatctcaatttactcctgaaaacaaaggtgtaagatgctaccattatctccggttcacacacaaatgagctaactaaggctcagaaacgtcgacaaacctgcatccaagtggcagaaccaggaaaagttacgctccttccctggagctatgagatattggatacaaattgcatttctaggctgtaaatgaagagaaagaaatcatcactgccctgtcttttaaaggactgttctcaaaaacaaactttgaaactttacaatttattatgtaataaggcaaagaatggagagaacttccaaagttcaagtacaaatagaatagctctaatagcaaagaagatgattcccaaaacagaaatgaaggcaagaaaatagctttgcaagacagctaccacagccttaaatgttcacattgtcacaataaatagcccaggcaaaagcttgctcatatctaaccataaaggctatgttcttatatattattaatatagaaatgttatctattagagccaagtaaccatctaaataaaaagataaagaaggtacctctgtctttatattttttattgaaatctagaaagctgaaagttaaaaaaaattaatctgtcatcttcttaaaaagtgggaattttccaaattatatgtgaagtgactaaaataaacaacaaatgagaatcatgtaataacagttttgaaagggcaatgtagagttcccctagtgatttctattttaaaataaatcagagcatttccaaaagccagagtgcttattttaaaaagagagggcatgaaactaatatagactaaaaaccatgtcttgctttgttgagatattaccatgagccatgcatactaacataatccaattaggggaatcctaagagtagagccatcaatgggaaaaattaaaaatattgcatctatatggaaataatctatatatttcacctctgaaaaaccatcagagaaataagaaatccattttgcactgacaacacagagtgagatcaaattctccacaagacaccagcatttctgttatgaaaaaagacacccattgttgatggcatgtgtacctcatatgtctccattttgtgtaaaaatcatctgcttttgtatctccttgagcaactctgaaaagaaaatcaagatgtttttctggacagaacaaatgagaagggcaaaagcaaaccagttggtagccagtcttcacttccttaaaaaaaaaaaaaatggcaaaaggacttagcatgtcaacctccacctatccagatggtttgatttatttagtacacgagttccagggaagaacgagcaagaagtatgactaagtattaatataagccaacaggtttttaagcttctttttaagtctctcctgcccagatttactaaaacacagagctttaattttctcagggctctgactcgaacagtcaattggtatccctcgttggcagattctactaatccactaccatgagtgaggtgggtataaagctagagccactcttttgatgtgattaatttcagggcctgaaaagtgccttctctttctttctccttctccttccatcccgattgatcatggaggaatcttttccaaaggtttctactgtgatcctctaactaaataagactcagcacttctcagtgatcccactgctcccttccctgcacatctttctgaaatacctggttttctgggtaacttttctttttcctaaatgtaagttattccatgtgcccctagaaatggaaggagacgtagaagacaagttactcctagaaatctcatagccctggcctgtaatcccagcactttaggaggccgaggcggcagatcacctgagctcaggagttcaaaaccagcctggccaacgtggtgaaacctgtctctactaaaactacaaaaattagccgggcgtagtggtgaacgtctgtaatcccagctactctggaggctgaggcaggagaatcacttgaacccagtaggcagagtttacagtgagccaagatcgtgccactgcactccagcctgggcgacagagtgagactccatctcaaaaaaaagaaaaaaaagaaaaagaaaaagaaagaaagaaaagaaaagaaaaatcatagcccttacttcaccgcacagctgaagactctctctgaacaagtaaaatataagataatccttggtttggtcacagggcataatgattaagcccatattctaggctcaggaaaaaaaaaatcagaccctgatcagcaaagactcttgcaaacaaggagctctgttgagaaaactaaataccacctgttctcactaataagtaggagctaaacattaggtacacgtggacataaagataaaaacaatagacactggcaactggaagagcggggagtgaggaagaggaaaagggttggaaaactacctattgggtactatgttcaatacctgacagatgggttcaatcataccccaaacctcagcatcacacagtatacccctgtagcaaacctgcacatgtaccccgcaaaaactaaattaaaagttgaaatgtttaaaaaagaattctgctgagacatacatttgcaatgccaactaatgcaggtttattgagaaatacatggtgagacaagctctgtttttgtgagacacaaaagcagaggccaggagatacagcagcaaggtgaaaacatgtcaaaagcatcagagactggggtgtggatggtaaagcttctggacacatccagaggcatacacagcaccagtgagcaacccttaaaacaagcttagggctggccagaaaaattttagagtgctaaagacagcgtgtgcatggatagtagccagcagtcaggcggtcacaagaagggtcagctatgaagagctattcagggacaagcagcatgctggaagatcctggaaacagctggcaggtcgtggagtcttgattcgctcactggctcctacacacttagcaggttcttcggcagctggacacgcaggactgctgatacgtcctggagaccccacaggctggctggcagacagtagagactcctcccactggttggcagacagtagagatgccgcccactggttggcagacactggagatgcctcccaggggctgacatccactagagacaaaggtgagcggccggctgtaggtagttgagcaggggttggaaatacaggtagtttgtcgagagcaagtcacctggcaagggttggagacacatgaagttcgccggtaacaggttggctggcaagcagtgggctcacagcaggtctcttgacagtggtccaggagccaagagccagtctggaaggaactgggcaaacagatgccgcccaggcagtcagcatcagtggtggaagtcgtggtaacttgggccactggaacaatgcagcgtcctccaatgggcctggaagagcaatttcttgtggagcagttgaaggacatgatgtcagacagagggctgcaggtagcttgctgaagttacctcctgagttgtgaatgtcactccagactcctgagcttttatatatccttgctggtgggtggggctctctccctggtctccgtggcttctttggctcagaccagtttgccttagaacatcttgtgaatctacacattaattgtctcttaagaagccttcaccctcataaagaaagtttagtagtttggtaactaaatcacaagtcttctgtactgtacttagtctgattaagaaggctggttggcagcttcaaagctattggtcatcccagcccacacgttgtccctcattcatcttgcttatgatgagtgttgacctgacactcatcctaccaaagatgccaccatcctaccatcacacactctctccctccctaccaggaccaattacaagcccatgccctgtttcatttgtcactggacttaatatcttttaaacataacttaatcagtcactctaccacacctaacggagctcctcattgggaaggtgcctccttgaatatgtttcaagacaacagtgacaacacttgacaggaacaaagggcacagagacttgtatccaaagtctgagctggctctcaaaattaatcaactgactcaaacaagatgcccgtgggaaggctagagggcagtgggacccaccctttatgttcaaccaacaaagcaaattagaagctaactaagtgcaactgtatttgtagccaagaccttttctaagtaaattggatgagctttattcctaaaatgtttaatttaataacagtggataatagtgactcctgggtctcattaatatgccagtggaaaaggcttagttaatttttaaaattatcataatgttaatttgaaagggtacagtgtctttctcccaatttgttcaatatgttcaaaagatatttattttcacacatatagatagaatgcattttaattatggacaaactaaaggctcttcaaggtcattgtctccatcagggataagggggaggcagagctgggggaagcaggcacttaatcaatgtttggtaatgaagagatgtgtgaagagtgtgctatatttaattattctttttatgcttggggaagctatagggatatcactctattttatttcatctcactacaatataatgaattttaaacaccagaatgatggctcgtttgggtccacctgaacatagatgaataaactgcctcaactctggcaaaataagcaacttcaacatcgcttcaagtggtcagtggtatttctgtcccaaaacagctgtagcatctgactcatttttaaactagcttacatgagggagcgtaagggaataaaatggatttccatgtatttgagggctacaggtaagctatgttttaaatatccacaaagcaaacagcgttatgtcaggactcatcagaaatccctaattggaaactaacgacacacccaaagaagagggtgctgtgagcaatagcatgattcccagatatcagacctcaatgtcctgaccctccctcagtgactcaccatgtgttcccaggaacggggtgaaattaatgagatgactactttccacaatgttgtggctatgctcttcccaccacagagggtatcttagttggtgtttgaaggcctgagtccttggccctagggcctggcttgcatgttgtaaaatggattactagtttacaggcttctcccagccacaggttcacaggctactatggaagagtacttaactgtggcaattcccaaaatctgaagtgagtagtagagttacaaaggagaacgtttcagtgcctactgccacattcctggaatgacagacaattgtataagttattaccttgtcttgatgtgtctctcccattgaaagctggaaattacagataaaaggatcctagaaaatatcttccatcacttcaggaaaaaagaaaatgagtgtcttttaagcacacaactctcttccaggcattgagttaaaggtttgtacaactcagccgggcacggtggctcacgcctgtaatcctagcactttgggaggcaaaggcaggcagatcacgaggtcaggagatcgagatcatcctggctaacatggtgaaaccccgtctctactaaaaatacaaaaaattagccaggcgaggtggtgggcgcctgtagtcccagctactcgggaggctaaggcagaagaatggcatgaacccgggggcggagcttgcagtgagccaagatcgagccactgcactccaggctgggtgacagagagagactccgtctcaaaaaaataaataaaatttaaaaaaataaaggtttgtacaactcatctcactgagttcttacaacaactctgtggagtaggtatcatgtcacatactggagctgaagttcagggaccctgggtggctcgccaaggtcatgcagtttatatttgactaagttgagattcaactaaaacagagtctctgaactaccaactcacactgaggatatttaaatgtgatgagatgccttccttcaagtgtgaacaagaatttgttatttttaatcaatcaatcaatacttcattgatgacattataaaggatataatcatttctcttctaggttcatcaattgattaacaatggaaataaataaaatagtaagtcacaagcactgctgtcctacttcgtatgttttgttcattctgtatccaatttaacaatttttaatccttagaataagacacaaggtcactacaaacaaagcaaaaaagaatagagaaacattaatagcttgaagctatagtttgaaattataattatgtataatagctgtgcacacaacaaattttcagagcgtagcagataagtgaattgatttttcagtcttatccattttccagagtctgccatttttcaggtgctaaatagagggaaaatgttgagtagatcccttagattaattattaaaagaaacttcagcttacattgtgactacaagcagattatttctgaagtcttatattaaaatgatttcagagtttgtgaataacatttctcataaaggtcttgccaacgtgaaaaatcgatacacttctctgctattctctgaaaatacaccatgccacacagaggtaggcaagctacttgatactctcatgcattttattgtcacatgcaagcactttgactctttatctgcattcactgtatgttgcaaaagtaaagaaacatgtactgacagtcacataagcttgatgaaactctacacaattttaatttgacaatgttgttcaatgaaattaataaatcatcctttccttggaatgtaagaaaaaattacacggccaattgctgtcactatgtagttaggcacaacctcaaacttcaactcagcaaaaagtcttgtgaagattattattctcatgtctgcagagcgtgaagtgaggggatgggtaataggagcagatgaggagagatcgaggaactactacccattatcttcatcactgatggataatttgctctcatttgtatagaacaatctaagccttatacaataattatcacaggctggaaatgagcaattctttcactcaaaactgaatcacagcaatcatttacaaggccaagcatttgagagtaaaatgagctaagcatgtgagggaggctggaggtttgataggcagaaaggatatttttcatcacaaatttgataataatgttgaccaacgccagttcagagaaaaccacttagcctcatcgaatggaggaatagtgaacttgtggaaaaattaatatatatgaaatgaaatgctgtcattctgcactttttcagaatgatcaccctctcaaattgaagctattcattgtctcttaagaaatataaaaaggaaattcagaagcttaagtgtagaacttaatggttgttttaaaaattaaatacatcttggctgagttgttctgctttctttccaacttcccacggacctctgggttgaatctccagaatctttattaaccaagacattataaagccctggaggctcagtgatttgcaccacaaaatggaactgaaattcattttccaatctcttttcaaaaagcatcaatcataagaagggttgaataatttgggctggaaggaactctagggcagaaagcagaaggtgaaagaaacaagcaaagaccagcaaaatagttgctgctttttgaacccgaaaatagcaatcaccagctacatgacttgtgtaaaaataaaccctcagaggacagtgtcaaggttgaaaaattctaaattgaaccattctctctgttgatgcctgttttcagattcatgtggtttttcatgtgtgtcttcaatggagatcaaaatcagggtgctgtcaagaaaggtgagtagaatcccaagtgtttttcagcacaactaactcccatgtggcaaagcccatgtgtcgttggcatgggctccagtcctggccttccaaataaagagagggagacccatttgtaaccagacatgagtaatgtttatgtacagggcctaagagagaaggcaccgagtctcccaagatgtatcatccttccctgatccagaattgttcagggcctactaggtactctgtggggtaaggatactggaatctatgtaggagacaggtaaagtggataggtcttctcttaacatgacttaattgacctgtgcttatgccctttcaacatagttcttcttggtctgatctgcctgtctgggggattaggagtgtaacattaggccagcactatctcaggttggtaattagacttccagtgctgcattttaaattcttctcatacaattctcttatctgattgatgagaagccaagtccgaaacagggagcatctttgccaagcacatcgaacattcttgtgcactacttcgaaactgtctcacttcatttcttactgtagcctctttgcacacacttaagccagtttcatgatggtgcagtcccaaagtgcttccttcactttgaggcaactcacgtgctccttgcttcctgctaggtcttctctgatgccatggcaaggaaagtccatgttaattttctctgcactcacatatgtaccacccagaagtggggtcaagtgtaggcaacagagaatgcaaaccaaaggatgaaaactccccacttttgtcctccaggtagataatacttgatatggttttgtcatgtctccacccaaatctcatcttcaattgtagctcctgtaattcccatgtgttgtgggagacacccaataggagataattgaatcatggaggcggcttcccctatactgttctcatggtagtgaataagtctcacaatatctgatggttttacaaagggaaaccccttttgcttggttctcattctctcttgtctgccgccatgtaagatgtgcttttgccttccaccatgattgtgaggcctccacagccacgtggaactgtgagtccattaaacatttttttctttataaattgctccatctcaggtatgtatttatcagcagcctgaaaacggactaatacagtactgaaactcacttcaggaagtcccatgggatcacgcacaagttgcttgcaatggtggctgacttgataacactttcttgtggttgctttccctactcttctatttcactacccttgcactgcaatccctggaataaaacaccaaaactgtctcaagctttgcttttcagggaacttgggttgagacacccagattccaaatatttgctatttgaaagaattagaaataataaccaggccttctaattcccagcttaggcccctaagggtacatgcatgcctctgtccatgcaatcccaagaaaaacttgtacacaagctgagcatccagcaagtgacatttgggtgtttaaagccatttctgcaatggccaaatcagtaactacaaaagtcttgaagtgcagctagattcttggtagattgtcacatgtattcctagtaatgtggatctactatgctggttccttaacataggccagtccctaagagtaacatccaaaacatcaaaagtttggcaaatattattgtcagtttcgtgtcactgttgttttccaaaacgaaaagatgctttttaacaaagtaagacatgcacctactgtgaaatgggagaaaattttaggtagtaaatggacaactcctttatagttttaattagtcatccatttatttttaaatgtattaataaaatagggctaggttatccaagccataattttgaggatattacataaaatgaagcttaagcaagtttttttaaagtgagttactataaataaacataaaagttaatataatataaaagttaaactaaaataatatttgcaatggtgaagatatgaaaataatgacaaaaattatcaagataaaaatcacagcagtgtgtttaataaatatttaaatgatttaatacaatggtttcatagatactgaataagtagtttagttttttaatttttcaaaattcactttattttagagaatatgatcatttaacaatccccattcacaacattcgcgcgcacacacacacacacacacacacactccaagtaccctgctccctcttctgtttatcaattactttgtaacaaatcaccccaaaacttagtagcataaaacagccatttatgatgtccatggcttctgtggcttgggaatttacacaaagtgcagcagggcagttcctctctgctccagatggatggggagcctgcgattgtctgaagtttcatttcttcacatttatggcagctgacacttgccactgtgggaatacctatgtatggcctctttatgggccaggatttctccaacactgaggctggttccaagagtgagaacctcaagagggtatatattaatatattaatatatgcttatatgataaatatgtaagtatatgatatatatcatatataagatacatatatatcatatatatgataaatatatatcatatgcttatatgatatataaatatattaatataattaacatgtagtattgtgttaatatatttatatataatctatatattaatagaatatctttataatcaatatataaatatatatttatatataagtatatattaatatatcactttttctgacctaggaagtcattgaacatcaattttgctataccctagataacaaggcatcccaaaagcccatccagataccaaggggaggtaaaatggactctacttcttgatgggaagtgggaaagttctggaagaggacaagaggctgaaaatattgttttggccatgaaaataaactactatcattctccaaattgccagcacaccaggactgggaatccctgagatgggcttaggtgatgctcataaaaattgaaattttatgtctcacatcattggaaatgttcagagtagagagacagctctttatcaaggaacactgtgatgcggattcttacaggaattagagagaccaatggatgccttcaacatcctaaggcccatgtgcttgatgcagtgaatcaggctaatgaccagcaccctcggtgctttcaaggagcttcagccactccagagtcttcatttattctggcttgatttcttaattaaacacttggcagctccacagcctgtggagaacatgtgtattcagggttttccatatcagatgaagaggtcaggcacatggaagctcttggggactctactgcagactatgggaacttcaccagtcttgacgggtcagctttttgaagatgacacagtcttatagtcttatatcataaatgaaattgttttgcagttagtggtggattgaagaccatgaagatggaattaacaacggaaaaataaaataccagtagcaatgctgagaacactgaattgttcccaactcagccttccattttctgtatccattgtatattctaaggtggtttcctcaggacgtctctgactgatactgaattcccattatttagggtgaagatcaaactggatgcaaacatcttttgtgttttaagacaatgtgtctttccctgcatgctcctgagccacaggtaaagaaggtcacagcccaggaaaagggtcagtcatcttagactgatcgtaaagcattgctcagtccttgcttttctgatcacggttatcatcgatactgaactatgaagtgaacctgaagccagcagttgctttagctaaaaggcaaaagaactaaaggttgataaaacgacccttcaggaaactaatcaactgagactgataaccaatctcatctttcacatcacttcttaacttcagtatccttttttccctacttatatcaacgcagccaccaactcttctttccttcccaagaaagacatagtataaattccacagtaacttttggttcctacaaaaatatctaatgtaaaaaaatattaagctcaagaaagaaaactaaaaaataactaggaagaactaaaaggaatgactaatttacagtatgaagaattatattatatattatataagggtaatggtaatccccagaattttgagtagtaattcagaagacaagcatggtaataaaaattaataagaatcaatataaaaagaaagcaataaagtgaatgaaatgtggtgggcatattcgaaataatcaacttttgaagagatgacttccaaatggattgtttgcaaaccagattgttttccacacctcaacacccacgcagaagcacaatttttgttagagaacctgttgtccaactaatgaaaacacataaagggtaatgttatctttgcctacaggtagagggctgcagggcatccaatcggccccacaaatgctcttactcttcactaggcaaatttatctttttcagacacgacagacacgccattcagatcatccaatccttgaaatagacttttcaatagaattctgatattaacttggtttttcaattgtccttacctactagaaataaaacaccctcagtacttagcataagtatgccaatccgatttcaatgtgagttacagttgcaccccggcttgtacatcggtctctttaaaatttggctagcttcacttagtcctccagaacctgctaaccctgggtgaactgacaaaattaaaagcctcagcagccaattgaaggaacagaccctgatcctgttgtcactgcacacctccaattaaaatgtagacaccagcttcagtctggacagctgactcatctctctcaatgaccaaaccattttatctgctacagataagaggtacacatttcactaaaagaccattttctcatattatctaatgaaatcctccttctccaagtacttttagcaaatagaattctcttttaagttgaatgatttcagtataacagaggttgaactgactaaatgacctctatgaaaagtggcttctggttttctgacatgccccttgaatttgatgccttaagaagaatgaggaatgcataaatgaagataaacggagagccatcagaaaagctgttttgtaatgagcaatagttgttctgataaattttaaaaattgagccttagcttacatgcatctaaaattgcagtgtattttttttctggcaactcatcatggcaaataatttggtatattgacctttgaatttagcatttaagtttgcacattattgcatacccaaatagtacattgtgtccattgaaattacttcttgcatatcccactgcactttctactattgcatattttaaatatcttcctctttagttatatatattacatattagaagccataaaacagtatcctagcagtagtcccacaaaccttcatttatatacaaacttaaaagctaaggcaaaatttaaaatttatcagaacaattattgcttgttacaaaacagctcttccaatggctcttcatttatcttcctcatttatgaattccttatccttcttaaggcgtcaaattaaaggagtacgtcaaaagttctacaagttccttccccaactttcccattgactcattgcatgacctgaggctcctcattgagactccatgggtctatttcatgatcatctgtaaaacagggataatgggatctgcctcaccagggagctgcaagaactgagttatggtttgcaaaaggctttgtgattcacacataaaaggcactacaagaaagcaaactgtcattgagcattacaaacagttttcatcccaattattttaaagtcagaaaagattaatattctaagcttccaaaagatattaaagcagcatgatgttatatagaatttccaaatctaaggcaggcaattgctgattcaagttgcttttttttttctaggaaccagagacgtcattcacagataaatgcaggtaaaggtaaaactgagggagatgtgaggtacatacttggctctgagatctggcaataagagagtttctctgctttcaagttacccattggaatcgagcccaagagaaatataaatgaaatatcttcccagtcttcagccacttacccaaatctggttttgacctaactcttcttaaagttatagcaataattttcatgtattagggataagttaagagttaaccttattaggttttttcttactacaggacactaaaaaattaaattgtaaattgtacaaagtgatggcgagacatctatgctgcactttaaattttctacgaatagcataagagaaggctcctaaggcattgagtagtccccacctccttattctaagggatagcttccaagatccccagtggatgtctgaaatcatggatagtgatcctacatatactgttttttcctgtatatacacacttatgataaagtttaatttataaattaggcatagtatgtgattaacaacaacaataataaaatagaaccattataacaatatactgtaataaaagttatatgaatgtctctctctctctctctcaaaatatcttgtactgtcctgagggtaactaaaaccacagaaagggaaaccatgaaaaaggggagacaactgtattcatagcttgtaaagttataatatttgatattaataatcacatttagctgcattgtacttattttcacctttaaattacaaccgcacagggaaggagtaaattttctcctattatcatttgttgtatttctgtattaaaagcctcttgggcactcttggcactgaaaatatcataataataatttaaaagattaacattcaccctcttccaattaagagagtgccatagctgcagtgatacaaaggtgaatgccaatgtcttggctataatataaataatgggactagaaattagcaatacataaagaatgaaaagaagaaaagaatggttttttaaaaaagtgattaccacaatgattaaaaaaaaaattaaaccaaggatggccaatagacttagggcaaccaagggacttcttctggagaaattcttaaaatttcaagtttcacaacagccttgccagatttctattacagaaaacccaattatccagataatttgcataatttaaatgaggcaaatgaaaaacattggctgtatagggtatctcagagtttactgtgaagattacagatgaaaagtgtgctcaactgagctaagagttggggttcgactctgaaagcaaggcttggacatcagaggtggggcttggtcaccagaacaaattgaggactagctaaaacaggtccagcatggaagcatctcattataagacacacctaccagcacatcatgtcagtttaccattgtcatggcaacgcccagatgttaccactcctttctatggcaacgacccaaccagtcagcagttaccaccattttcctagaaatttctgcataaaccactccttatttgcatgtaattaaaagtgggtataaatatgagtgcacagctgcttctgagctgctaccctgggcatgctgcctataaggtagccctgctccacaaggagcagtacctgtgcttttgtacagaggtacttgccacttcagtaaaagttgctgtttaacatcactggctcacccttgctttcctgggagaagccaagaactctcctgagctaagccccagtttgggggttgtctgtcctgcctcaccaccacttagccatctagaaccttgggaaaagcaataagactgctaatcccctttttgctaactataaatggaaacaataatggggcctacatagactttgtgggaggcctaataaagtaatgtctgggacatgtagacattcgatacataatggttcttccactcccctttttctttcatttaagacagggctttgtaggggcccaatttttcccaaataagaatttcaatttgtttaaagttgtcatagattcctaaccatatataacttcttagtgcatgcaattaataaaatatagaatccaaacaacctgtaatagttaacaattacagctttatacttttagatcatgaatagggctcaagattttaacatgaatccccaaattttgtactagctacagttaaaatgtatttcatttcttcataacctttatagctatggccaagatcaactcactacgctatcattcctcaccatggtggcagggataaaggtggtctgcctatgctttaggacccacagttctgaaagaggatgcctgaagtggtgggtaatacttcacgcaggtggaggggagtggggaatgggtgggttccaaacttgtctaaagtaattctaatgacagtagagagcaaacaaatatccttaggaaatactggtagaacccattgggagggagcctaaagcagcccagagcaagtgcaaaaaaaattttgaagacttatattgtgtcttaatatcacggtagaaccattattatcccaaaagtcagcagctgattcttcttaatgaaagaatcattccaaactgccttatttaggaactttggtcagttcttcggaatagaggatgaggctctcagagcactattgtcagcagaagccaaggcaacaaagaggcagctcgctcgctgaaccactggtacaattggaattgctggggagaaaagaggaaagtgtcaagaaataggagagggacagagagcacagatggaggaggagataatgagccaatctcatattttaaggcttagagatctcacggaaattatgtcagctatctgcatgtcatagaagagcataacgctgatctatgctctttatctgtgcttaacaaaacttcctccaaaggtagtgttgaaaaggaatttcaagaacagtaatatctgttttccactgtgaagttgtccaagctgttgttacatgttccctcccccacctccccttcatcagtatggatgattcatactagtgaggtttgtatgtgtgtgttggaaagggcctaattttcacatttggtcaactcaaatgttgacaaaaggagcatgcatcagatagatatccaaaacaattcctggaaataggaattcaaccctatgttagggtgtaggctgagaatactaagtgccctatgaatacattagagtcttcaaatgccttcggacttccacaaagttgcaatgaactaatcatagctagataccgagccagtgttttaatttgtagtactttgatgatgagagaagctgttatttatttattgttatatcgtgttatttatttattacttttttagtgaattgtccacttatggctatgcccaattttctgttcaggcacttatttttcttactcatttgtaacaaacctttacatattaaacatacaagctctttcacagggattacaatatttttttcttctactactcttgccttttaattcggatcactgtattgttgacatacagttataaactatagattttttaaataatttcttcctatgttacttaggcttaaacagaccttcaccataccaaaaggttcatctacttcttctactcgtttggtaagaaatttttttttgacatgtaactataacttttctggaatttaacttgctataactttatttagaatgttgagatgaaatttataaatgagattggtgttatggattttttttctactttcatgaccagattggggtaataatagtttgtaaaataataccagctatctatatgtcataaaagagtgtatacagtataacactgatctatattctttacctgtgcttaacaaagtaacagagcttactagttcagtgttctgggcccaaagcattttcagaaagtaatttttgaaaaatattttaatgtctagtttgatattttgttcagatgctccgattttttattttttccttctcattgaatcatttttatattcatattccctcctattcattcattcttgagattttaaattttagaaaagggtttaagtatttgctcgtaatttttaatctcaatagctgtcatttcattccctttttatgcagatattttatttttagtttttctaatttcattaatttctgccgtctgtgttattttccctttctcttttgtaaactatatcatgttatttaccaaatttttatttatatactaaatatatttctgttatagaaaatatagctttaaatctattatgtcatctgaatttattatattatttagatatatcttagcattatttcctatttcttctgttatatactgaaaaaaggacgtgtatttttttagtttcttgacttgttcttgaatttgtgttttttatacaatttgatctttttttagtttggattacagaatgttattacactcgtctttttttaatcacaaaccatttttgttctgtttcatacttttaccttgaagcctaattgtttaatattattactgtaactccagatgttttgtttgattttcttaatgtagtgtttttatttttgtttttgagacagagttttgctcttgttacccaggctggagtgcaatggcgtgatctctgctcactgcaacctccaccttctgggttcaggtgattctcctgcctcagcctcccaagtagctgagattacaggcatgcaccaccatgcccagctaatttttgcaattttagtagaggcaaggtttcaccatgttggtcagcctggtcttgaactcctgacctcaggtgatccacccaccttggcctcccaaagtgctgggattacaggtgtgaaccttaatgtagtttttcttacccttttactcttgacctttctgcactgttttattttatgagtactcataataaatagctcacattcagatatcgtttctgatccagtcctaatatttaggttttaataagaagtaatgtgctcagggccgggtgcagtggctcatgcctgtaatcccagcactttggaaggccaaggtgaggtgggcagatcacctgaggtcaggagtttaagaccagcctggtctacatggtgaaacccgatctctactaaaactacaaaaattagccaggcttggtggcacacacctgtaatcccagcttctagggaggctgaggtacgagaattgcttgaacccagaaggcggtggttgcagtaagcagagatcgcaccactgcactccagcctggaggacagagccagactccatctcaaaaaaaaaagatgtgttcatatttatttcatgtttgggtttgcttttgtcagcccattttgtaagtcctattttaagatttcttacttttttaccattattttgatgtgttaataatattttcatttatttttttcaatcatacatctttattcaattctatatgtcatcaccttgtaaaatattttaagacatacttctcataaaagccaagaattgcaaatattccaaaagttcaccaacattagaagggataaataaattatatgaatagataatgaaatcctataaagtaataaaattaaataaactaggctagatcaacaacatgaatgacccaaactgttgaacaaaaaaaagcaacatacaaaataatacatacatacagaattttattctgcttacataatgttcgaaagcaggcaaaagtaaaccatattgttcaggtggcaaaatgattttatttcaagatcaaaaaagttaggatgatattcatggctaaggggaaggaatgaatttagaatcagagaggaacaaagcaggctgctggggtaggctggtgtcagactccttctgcccctgagcggtggttacactggtgttagcttgatgattaaagcaccaaatcctacgcattcatcgtgtgcaagattctatatggaacactgcatctcacaatgaaataatctcacacatctttgtaatttaaagaggttaatgtcagaaaatataccatcaatttcttctcctccatgtaacctgaaggcattcataattttacatcatgcctccaattcctcacttgttattttgttagtaaaacccaatttctattttttaaatttgtatcacttttcaataactatttatggcctacttagctgactttacaactacaatcataagactcatttaattatttttttcactattgaccattagtcattttgaggttttctttttaatttccagtagcttaagaagagaacgttattagcagtctacttttttagccaattattatctgaaaatgtacttcagttgcattccatgtgaataaaaacccaattaactattaaacaaaaaaattttaaagccaaacatatttgttctcaaaatcctgaaagtcgtgcttcatttcttcttgcagttaatgttcggaagacaattctgaaacaacacgttccttctgttacatctccaggattcatgaaccatattatcttctctctcatcaatttcattctttatccccttcatctgaattctggaaagcttctcaaagttgttttccacattatgattcattacatcatagaaaaacttttccattttaagcctcctcatacagattttagtctttctcatgcaaattttaaatcagcgattacattttagtttcctttatcttttcctgcctcatccaactcactgaattttcgcttgcttgctctctctgtctccctcagctggatccctttttaatctgtttcctgtttttcttttccccatgcttctgcttcatattttctagagttttattgaaagcacgaagagatcattttacatttgttctctttcttgtggaaaatattttagaaatacaacatctgcatcttcttccttttaagcttgagaacattttcttcagtatcgtattgaggccttctggtgtgatccatccatatttaatgaggatggctcagactctttggacccctctcatccaccgtgtatttttccttaaaatttccttttcagacctttggcagaaagcttagttgctctaaattacatgggtacgcggctgtttcagagactgaggaaatggagaagcaactctatctggtgatccactctgctgaggatcagctgtcagcctttttctctctgtggcttgtcgtactgcccaggttcgtggcaaatcttaagcaatctgcttcgccaggctactgcttagcacatcaaatggaaaaaatcaaaggtgtctacaagacatcttgcctccctggcagctttttgcttaatgtgaatcctatatgaactctcatatctcctaatgcaagcactttcatatactcttgatccacatccatgaacaaggagttgagtgaacccaagtcaccttctccagggtacacacagctgtcagactcatccctcctaattcatcaccagtgggactttctaaaagtctcagccccatatcctttgttttggaaaaatctacattaagtataaagaaactaactaatatccccagctttttaactgtactttcccataatttccagtgatcatgtttgcttcttgatatttatatatttcttcagttgtttctatgaggacccaaggtagaagtgttatgttatacaaattatcacagtctttgttgtctggaagtcataatataaatatttttaaaccaagaaatgagctagaaattccagaattttccaagtgggtcagtcctgacggaaaaaaatgaaaaaagtagtgagagaaaggaaggagagaagcttgaagtatttcactcttggcaagcctcaaataatacacctgtcattttggtgagccatcttattcaggctgcttttaactcaattttcaggtgagtcacctcaaaacttcaaactgcaaaatggtcagcttgcatcagggagcaacgaagctctcccaaatcttgtaaaataagatgatttgtgagcagaattacccaaatactatttcttgaggttattttaagcttttgcttttcttgcctccctgataacttcaactcagataactacatggagctttacagtgctaatctaggaaaaaaataatattaagattggtattattataaatgagaatccagttatagaaatagattagcacagtttcatattacactgtaaaaacatcaaaatgaaattaaacatctttcctaaagtcagaaatcttaaaatatatatagtctgagtttccccatgatctgctgaacaagttgaaataattatttaataactagaaaaatatgatggacacatttcacatgtttcctgggggtgagaaatatttcctggtgtttttttattcccattaagtgacaagttgacgaagaatagagcatgtgagacacaaagaaagaataatgtctacatgccccagaatgagaagtttgtctatagcaaaagagagaccactgctgccaccaagctacagcctgaccctaggcccactgtcccccgaattcaggattcagctgcagaaaaaaacgaacaactgttaaagaaaaaaaactcttcaaaggcacttgttaaagcagaataggaagtctttattcaggatcatcacattgggcatagcggtcactgcggtgggattttgcaccggaagagagagattggactcagctttgaatacagcatgggcaagtggggatttacagccaaggagcagtgtgggggtcggtggatggaaaattattaagaggaaccatcagagataagaggaattctggctaaactgacctacaaggattcttgctgaagagggacaagggtgatcagacatcatctgggggatggtagagaaagagaagcctaattaggtatcaaaggtggagggtttttgctaagctgacttagcggagttcttggctaaaactggattttacaaggaaatgcaaggacaagcttaggagaagcttcaggagcctgagtaaagtttggtcaaagatatttgttataacataaactcctctgtctcatattcctgtacttccaagcgattcaactatcttgaaggtcctcctgaccagctctgacaatctgatcagcaaaatgtatgaatttgtaaagtgctacatcggcaatttagccataaaactagatgttgatgaaatcatgttgtacccgttatctaccataatgctacataacaaagcaccccaaaaccagtggtgtaaaaaaatataagcatttaatttacccagaggtctgtgggttgttggtctaggctgagttcgattgagcagtacttctggcctcagctggctcagtctcaagtccgggggtagctggttgttagctgatctaggacggcctcagctggggtgtctgggacaactcagctctgctccatgtgcctcatcttacagcaagcaagccaggcatgttctcatggaaatcacaaagctgcaagagactcatcaaaagcatgcaatgcttgttccgccttcttcttgggttacattttctaacatgccattgtacaatgcaagtcatgtgctcaatctaaagtcaagggatgagatggaatacccagcccaaagggcactgaagaattacaaggcaaagggagtggtgcagggaggggtgtagaatgggagctgctatgcaatcaatctactgcacacctttaatgccactttgtctcccatttgagccatggcaatgctgactacgctggttacttaataacaaacctaatccctgggttaggacgtcaaaatcttaaactacccacccaaatgaagatatctagtcaactagctccaaaacagtggcaattaagccactgaataattatgattagcaatagataaaatttaattactaatagataaacaaaattagttcatatcccagtaacacatgcaaccgtggtaaatccacctttgttctcatctgatggaattcaagattattttctaacaaagcagcaagttctggagaaaggttggagtaaaatctttattgggcattaaggcaggcaagttaagggtaagtaacaaaatgaggttccctgaaaataaaatcaaccctttgaaagtgcagggtcatgagtattccaaacaataatatacaaaaataaattgaaaatcacagatatatttcctcaaaatcatcattagaaatgtatcacccacacatttaaaatatctgtattaaagattttcatggttagatctgcactgggtgctttaaaagcaaattctgtctctagtttgaagcagattgactggctatgctttcttagttgttgcatggatttgtttgagatcaaactttttctccaaacagctgaatatgattcaaatatctctggttcaataaatttttgagttaaaatttggagtatatttcgcacttcaacatgctgagataggaaacccaaattgcttgtaatggtataaatgtttccatagtaggaaatgatggaataaattaagttcttaacattcatgcttttgtaataaattcagtaataaccttttcgatcattggcacagtctatgttttgtaaacttaatctaatcagctgatttggatatttcatcagaagaaattttggttgataggttcataacttttacagcttgttcaatgaaaactgattggattttgcatatctcgtagtttttcctgactctgatcaaagtcatgttaatgatagtccttccaacccaaaggactttgaataaaacaattctctaccaaggcagcagaatcacaccccattccaactcaattcttttttggctggttatctgtgaagtttctttcctctttcgtgatccactttgtttctatctctaggataagaaagaatttctctaaaaaactgctgcactaacgattttaactctttttttttttgagactaaaatatgaagcagatcacacggtacagtgtggtaagagtcctaacagcagtaggcaccttttatccaatttcccttataatcagcacgtgggttgtttcagacagctggttgggctgaggcactttcagagaccatagaatacagcaaagtctccttatccacagataattctatgccatgccaacataaagccttctcagcaatcctaaaagggaaaatggaaagattctacaaatatctttcatttgtagagctgagcgacatccccagacttgcctcaattttcagtcctagttgtcatatggaatgaacaaaattatgaaagaagctcttaataagagaaaggtttatttcttcctaaatctaatattagtgcagtttgaataggcattcaaagaaaagataatgaaacttcattgatggaattttatgaaaggtgtcaggaaataaaaaagcaaatttatgtcttctcactcttgaataaagaagattttactaatagctaaaatacaccacaataatacaatagcaaatttttttctatcctctgctcccattgctgaacacccctcaaagtgatctgaaactgttattttacattctgcccagcctttccctaccttaactttctccagcctcagtaacattgctgaaattattctcctgaaggtcaccaatgactgctttacattttaccttattttattgtaaatggtaatgaaaccgcctttgcaaaagttataactgaggaaattacgacagtgaaagagatcagacttaaccgactccatcttgcttctaacctttaaactaactttgggaaggaattcagttcatgggttgactctgaaacaaaattgataacagccctttcccaaaatatcgcccttcttgcctggggaccagtctgcatttgcagaaataacaaatgagctgcaagattagaaattatggtttaggggtcatgcagcctctggttccaagagtctgaacctccccaaattgctcaaaatgtaaaatcagtgcaaattgctcaaaatgtaaaatcagtgcaaattgctcaaaatgtaaaatcagtgcctcagatattctgcagaccctgcattggctggatcaactgacaccacccagacgggtaatctggctcgaccagttctgcgatcccacccaggaagagaaaacagcaagaaaaactcacttcaaccccgtaggattccatctccaacctgaccaatccacactccccacttcccaagcccctacccgccaaaatatctttaaaaactctgatccccaaatgcttggggagactgatttgagtaataataaaactccagtctccagcacagccggctctgtgcaaattactctttccaacgcaattcccctgtcttgataaatcggctctaactaggcagcgggcaaggtgaactcactgcgcgattacaataacacataaacagaaaatcacataaaacaaaaacactaataaattatcacaacatatttgtaaaatatcaactatctctcaggacaaaaaaaaagaacgttgtctaatctctctctcctcctcgaagaccatctctatccttatgcctaacactgtgttttgtttttcctgcttttcatctttttatgaatggattcatgtgcctcccttattacggaattctgtctggcttattatggaattgtgtgtctagcttatttcttcaatattctgatggtgagatttatccatgccattgcatgcatcagttcattcatttgcattgttatacagcgttcgtattgtatgactattgcacaatttatctatattactactgattaacatttagatcatttccaatatttggctataataatgttgctatgaacattcttatatagtctcttgctgcacttgcacacacatgtctgttgggtaactaaaagtcaaatttcaagaccatacagtacatatgtattaacactaataggtaattagcaatcttacatatttctacttcccctatcagtttgggaaagtttcatttccagttcaacatttggtgttgtcagtcattgtaattttagcaatttagggatacacattgtacctcctagtggctttagtttgtaattttctgattagcacaacacttttccgtgtctgtggctacttaaaggaatcttttgtgaaatacctgttcaactctcttgcctgtttttctattaaactaccgttttcttattgacttgtggtgttcctttatatgatatggacactagctctttgtcagttacttgtcatgcaaatgtctcctgctgcttggtggtttaccttttttactttcttaataaaataccttaatcttgacaccgtcctgtctattgacatttcctttacatttaatgtgtttgagggtcgtgtttatgaaatctttcttcaactggagtttatacatatattctcctagcttttctttcacaagtttttatgcttctgcttttcacattgtaatagagaatctagggaattgattttttgtgtactatgtgaagtagaggtaaagcctaaattttcctcctgaggatgtccaattgccccagaaccatgtattgaaaagattccttttgcccactgtcctgcagcaccacctttaacagaaataaattgttctgtttctagaacatctattatatcctttgatctagttttccttgtgccaatatcacattgtcttaattacagtacagctttatagtaggtcttgacatcttttttttttttttttttttttttgagacagggtctcactctgtcgcccaggctggagtgcagaagcacgatcttggctcattgcaagctgtgcctcccgggttcacgccattctcctgcctcagcctctcgagtagctgggactacaggcgcccaccaccacacctggctaattttttgtatttttagtagagatgggatttcaccgtgttaggcaggatggtctcgatctcctgacctcgtgatctgcccgcctcagcctcctaaagtgctgggattacaggcgcgagccagcgtgccagctttgacatctttatagcataaatctctcaacttcttttacttcaagagtgtgttggctatccttggctctttgcatgtatagatatatatacatgcaaacatatatatatatatataaacttgtagggaaattaatatctttataatattgagtcatccaatctataacatggtatagccatccatttcttttatttctctcaataatattttatagttttctgtgtagagactgtacacatctttcactagatttattcttaggtgtcatattttatgttattatacatagcatttttaaattttattgtctatttgttgctgacacacagaaatacttttgattttatatacagaccttatgctcagaaaatatgctaattttgcttactacttctaccaatttacttgtgcttttgttcctaattttgtccacacgtgatcataggatctgtgatacgatagctttattcctttctttctaattctaaagaattttgtttcttatatttgcctttttgcacagactccaataaaatgatgactagaagtgacaaatatcgggcattcttatttcaaacactaatgtctcaaaatttcaccactaaatataatgtttgctgaagtcttattatagatattattgacctggttaatgaaattcccttatatttttcctatgctatgtgttcaatgtattattataaacagatgttaagttttatatactttttctgcatctattgggaggaccaaatgatttttccctcttaatgtttctttatgctatacttattttcaaatagttaactaaccttgcttttctgcgatcattttacttttcattgagttataacttatgtaaaataaacctcattgattctacatatacaatttgatgaagtttggtaagtgcatacagtcatgtaaccatcaccataatcaagatacacaataaatccatcctaatccctaaaatgtttcgtcatgccctatggctgtcaatcaccacctctgatgagtggcttcagggaaatattaatttgctttctatcattaccgttttgcctttctttgagttttaggtaaatgaaataacagattatgtagtctgtggtgttggaattatttcactatttttgagattcactgtttccaaaatccagtgcattgttgcatgcattaatattttactgctttttacttctgaatagtattccacaatatagaaataccacaatttttttaatcatttgccaattgatggccatttgagttgtttacactttttggcatctatgaacaatactggtatgaatattgttgtacaatatattatatgcacctatgtcccatttctcttgaattaataactagtaatgggattactgagttgtatgttaggtgcaggtgtatgtttaactttataagacattgctatattgttttccaaagtatttgtacaagttttgcattcccactaacactattgtcatgcatcctcaccaacacttggtatggtcagtctttttaatgtcagccaacctaataacatgtgatatctcatttggggttttattctgcatttctctgaaaactaatgatattaaatattttcatatgattattggctcgttagatactttaatttgtgaagtatctgcccaaattttttgtacattttaaattaggttttcttattattgggttctctaaattattcttaaaatattctttaaagtataatttaaagaattattaaattattctttaaacacatctttaactgcatcccacattttgatatgtagtatttttattatcattgatttaaattattttcccttatggtgtcttttttggcccatcagtcattcatttccaaaagtggggattttctggttaacatttttataattgacaaataatatttgtctatatttatgaggtacaatgtgatgttttaatttctgtatacattatcaaatgattaaataaagctaaataacatttccttcacctcatattgtttttgtggcacagacatttaaaatctgctctcttaacaattttgcaatatatgttacatcattatgaactatagttaccttgctgtgcaatagatctcaaaaacacattccttctaattgaaactgtaccttttggccaacatttcattctccaatccccacctccagcctttggtaaccatcactctattctctacttctatgagattaactttgttatatttcacatataagtgagatcatgcagtatttgtcttctgtgcctggcttatttcacttagcaaaatctcctccaggtttatccatgttgtcacaaatgacaattcccttcttcttatggctgaatatatttcattttgtatatacactacatattcttattcattcatccataatggacacttaggttgattccattctggttaactttttgttactgatttgtagtttaattggtcttcactcagtgacattttccatatgatttcaacccctagaaatttcagggaacttgctttatggtcttgcatgtggtcaatttatgtcaatattccatgtctgcttgaaaacaaagttcattttacagttgttgagtacagttctcatgtatttaattaggtggtagttactcatgttttttaattctattttcttactgatatttctgtctggttgcccatgcattttttgagagaggcgcttttaaatgtttcgctatgattaggaatttttccacttctgataatttttgctttatataagtctatgttattaggtatatgcaaacatggaatttttatcttcttgtgaattgaatattttattatttccaacacttcatctgtattttatttattttttgtcctaaaatgtatgttgcctggtatgtaaatatatatacaaactttcctttggtagggtttgcatggtatatcttttctcatctgttttccttttaaccttatatttttgaggcatgtcatttataagctataaattgttaacgttttatcccatttgacaaactttgtgttctaattggacagcttagttcattgacaattaatataattagtgacatatttcaatttgcatctactgtcatactcagtcccttctatttatctaacctgttcttttttttctttatccttttagataaaatattcttattattccactttttatcactattagcttagtgctaatatctgaccttactattcttcacttatttccctaaaaattacattattcatccttcagttatcaaaatctaacgttacatgggactttttggctcttccagaggaaggtaaaaaattgaaacatttttaatttcattaattcccctcccatttatataatattgtcatattttctcataaggttctacttttatgttttacatagtcattaaacatttacatttcttcatctgtttctcatttttattgttctttatttcttcctgtatctcacattctgagcctgaataatctttctctgtctttggcatagattacaggtgatgaattctgccaggttttacttatctaaaaatgctgtttatctatttttggatgttattttccctggatacaaaattcacagtagcaagttatttactatgagcactctgagaactctgaagataacattttattaccagctagctttcattgtttcaattctgcagtcagcttgtcactaatagttgtccctttgaaagtagtttggctttttctcctctgaatgtctgaatgcttttattatttttctttgtttttggctttcagatgttttaatacgacaagctcaggtttgtttgtttgttattctcttgctcaggatctgtagggatgattgaatatgtgactttatggtttttgctaactttagagaattctcagattcaatctcatcatatattgcttccagcccattatctctcttttatgctccaggggatccaactcatttttttcaatgttgttttcactctcttctctgtttcctaattttaactctccatatttcactttgtattttgcagttgtagatttacatgtggttcatttttacagttactactttcttgccaaatttttcaacgttttattttattttctggagcatattaagcatagctattttaaaatttagatttgataatatcattatttgaagctcctgtaggtttttctttggtcattaattttggattttgatctatgttgttttgtcacctgcttattttctgttgaataccagacattattagttcgaaaattggagaaataattatacaagttgtagaaataataggaatcctgtgttatcttcttccaggaaaaaaaaaatcttttctttttctagtagatgtccaaggtaacaaataatctggacttgccttgaattcaatttcaggaattaaaataattcaaagtgtggcttcagtccttgcaaggactcttctaattcaaatttaccccaactcccagagcataaccttttgggttctcaacttaaaatagggagttttacaatgttccaacagaaggtacctcaatttttttctcccaagccacaaaaaacttccaaaatttcttcccagttatcttggcttctcaattttcttttccagattttggtagctacctctaagtaaaaaatacccctcaatgccagtctcacttctctgagtgagtcaacccaattgcttctctaataacttcaagcagataaactctttttttctttgacattttgtccagattttctaattgttctcaacaggaggtttaactcagattaactacctcatcattcctggagaataataactcattggtttcaaaatccaggcttttttttctgaattctcattctcctttaactctctgaggcactcaattctgttgcttaatttcttacttgaaatttttcattttcatcacattatacatttctgatttttaaaattttcttattgctctatatatttctacatatactctatattccttcctcacttattttacaggactatgtttatttttatacatgttcttttatataggtgtatctcaggataaataacccttctaaatatatcccttcaataagtggatctactcctacagctacagttacatggatgatttctacatcttcatctttagtcctaaaatatcgtttatgctcacatctcatattttaaacttcctagaagacatcttcatttagatagtcagtcaccacctctctctaagcatgtctgttacctcccttccaagccaatgtttcatcacaactaaactattttgaagggtccaggccactgggcagggacagaaacaaacacagaaaaggagcagaagaaggcatacgtgccaaaaagagccacattaagctagttggtgacttcctggatttaggaaatagagaagagagaattgaacatgatcccaggttttctttttcttttttgagacggagtctcactctgtcccccaggctggagtgcagtggcgcaatctcggctcactgcaagctctgcctcctgggttcgtgccattctcctgcctcagcctccttagtagctgggactacaggcgcttgccaccatgcccggctaatttttgtatttttagtagagaaggggtttcaccgtgttagccaggatggtctcgatctcctgacctggcgatcaacctgcctcagcctcccaaagtgctgggatttcaggcttgagccaccgtgcccagcgatcccaggttttcttgattgaaagatgaaaaagtgccttcatttgatataaattagttaaatgggaagagaacagtttgggagagagaggtgctgtgtgtgtcttcttttctttttttctttttagtgacagattcttgctatgttgctcaggctggctttgaactcctaggctcaagtgatcctcccacctcagcctccagagaacttgggactccaggtggtgcccatcctgcctggatatgtgcttgtgttcttgtcacccaccttcctatccccacacccgcccttcaccgtcacctccattagaaatatattctgaataatgttttcatattcctcctcctaaaacacaacattctcacatcactccaaatattaagaatctagagtgtctcctgttaccttctgtacagactccaaacttctctgctgaattttcaaggtcatttgtaatctgtttccactctacctagccattatttcccatgatgcaacctctactctaatcaataactttcctcaaaaatttcatctttctcatttccagaagctgggaagtcacaaaatccactctaacaagaagtaaaaagctgaacaagctgaaaaagcaacaatgcttcttaggttcatcggggaaatgaggtgacagggcgaatcataaccccccaaattggaaagacagacaggtggaaaccaagagtcacaacttactggagcagaaacctataagcagaaactctgggcagatagaaaaacccaaactctcattgatgaatttctggaggctcagtgtggacaagtctgagagttaaaaacttcatgggaggctcaggcataaggggtcccctctgtttttgtgaattttacctccagaagctctgctaggttctcacagtgaagactggagaaaaatcccctcatgctcctggcagggagcagtaaaaagctaccactttgaaatacacagagtcttctattcttcataacaaaactctccatcaagagaaactattatactctttaaagccatcagagaacagcagactaaagaatgctaaataaactaaattcctaaagaaatgagtccttcctgaattagccaagactggtggcctctaccaaccctaaagtgagagcacagcagtcagaatgactctgcactaagcagaagaagtgttctacaatagaaaaaaagaaaatcaccttaacagccacagggaggctggcatggctgacttcaatctagaggactcccaaacaaatattggtcttcctcgcttcacaattctttcccacataactttagcggaataaatgacagcactaggaccctaggatcaggaagggaaaggggagaaagagggaagggaagagatatctttagttctgggtaattcaatttcaaaattctgcttaaagatattaacaccagaagttaattgagactgcctagagtcaaccaacccattactgaacccagcttctggtttgattggatactttaattcctcactctagctgcctttaaaaaaaaatggaaaggcaagccttttctgagttcatgaatatctaattttgtttctactgctgtttcatatacaaggtctagtatataataaaatattataatacaggtaaagaagtaagaaaatatgacccataattaagacaaaaatagtcactagaaggagacccaaagatgacccaaatgttgaactaactttaaaaacaccatattaattttattaacttacattatatttaactctattacttagaggaacaatgaggcctttcagcataaaaaagaactaaagtattattattaggtggacttaacggaagactagacagagcaagagaacgggacagtgtactgaaaaataagacaatagaattagttttccaaattgaagcatgagagaaaaaaggaatagaaacaaatcaaagcacacaaacagaaaatcacagacatgaagggaaaacatgaaattgtctaatttatatgcaattggagttacagagcagagaagaaagaaaatggaggaagaaactttaaagagatcatggctgagaattttctaaaatttaaagtcatcaactcacaaatccaagaatgcagcaaacattaaagataatttttaaaataaaatttaaaagtagacacattatagttcaaacagctgtatagccagacttaagagtccgtcttcaaagcattcagataaaaagactcattctgttcacagaaactacattgacaataattactaacttctcatcagaagaaaaagaaaaatgggagataatggaataatttcttactatagccagcaacaaattattcaaaaaatgaaagtgaaataaagatgttttcagaccaataaaagctcaggaagttcattgctacaagaaatagtaaaggaacttcctcacagtaaaagaaggaatggagacaatggagaaaggccaaccacactgcaaagtttatcatgcctcgctgttggttcggaccctcattcctcatcacgacgcggtctcagtgtggagcagaaagcagcgaaaggtacatactctgaaggagaaacaactgcaggttgtctcagtctgttctcatactgctataaagaaatacctgagactgggtaatttataaaggaaagaggtttaattgactcacagttccccatggatggggaggtttcagcaaacttacagtcatggcagaagaaggggaaacaaggaccttcttcagaaggtggcaggaaagagcagacagcaggggaaactgccactgataaaatcatcagatttcgtgagaactcactcacaatcacgagaacatcctggcggaaactggccccccatgatccaatcatctctcaccaggtctctccattgacatatggggattaggggaattacaatttgagatgagatttgggtggggacacagagccaaaccatatcacaggttaaaatggtcaataaaagcaaaggtgaatacttggtatttgtttgcctttaaagaatggcagcaacagagaaactctcagagctggagactgggtgatatacacatgaggtattacagagctgaaagcccatatgatggctcagttttcctcattgtggcaagctcaacccaatgattgggctaattggaaaaaagagggtcacccctcccccaaaagaatagtattgcctaatgttagggaaactggtacccagctgaatggtttcaatagtacagaagggaaatgtcaaaagacaaaaatgttgtaatcttgaaggcaaaactcttattttcagaaaagataattatttgtctggaaaaggtagagattacatcgagaaatgattacaaatgtgatactttagtacgatgattgttcataagtaaaaataccaaaatcaagtgttttctcataagccaaaaatacgcaatgagaaaacatttataaaaagcatattaataaatttaatgtgaagtgtaataattttacataacttatagcactaaaggccattcactttacacctgtgcatttaaaaaataaataaaaagttaaagatattaattctctcccaatttatttgcaaatttaatgcaatcctaatcaaaattccggcttaaaagagaaaaagtcatgaaagcagcaaggcataaaacagtaaagtcaaaacaatagaatagaatcgggaaggcctggtgcggtggcttatgcctgtaatcccatctttgggaggcggaggtgggcagatcacctgaggtcgggagttcaagaccagcctgaccaacatggagaaaccgtctctactaaaaacacaaaaattagccaggcgtggtggcacatgcctgtaatcccaggtactcgggaggctgaggcaggagaatcacttgaacccaggaggcggaggttgcagtgagccaagatcacaccactgcactccagcctgggcaacaagagcgaaatgccgcctcaaaaaaaaaaaaaaaaaaaagaatagaatcaggaaacagatatcaggtaattttgcatttatatggcaatttaggaaataattaaaggatcagtctcaatagtggagaaaggatggactacttccagtaaaataatgttagtgtaactaataagccatttggaacattttattaatacctaagaaatacagaaggctcaaaatttaaacatttctttaaaaaaaactttcggccaggcgtgggtgttcacgcctgtaatcccagcactttgggaggccaaggtgggcagattacaaggtcaggaaattaagactatcctggccaacacggtgaaatcccatctctactaaaaatacaaacattggctgggcttggtggggagcatctgtagttccagctactggggaggctgaggcaggagaattgcttgaacctgggaggcggaggctgcagtgagccaagttcacgccacagcaaaaaaaaaaaaaaaaaaagaaaaaaagaaaagaaagaaagaaaaaagaaaattttcatttcacttatagtatatagcttaacattcaatccttggagtgcctggtaatagaagactcttaataaaaagattgctgaataactgaataaaaacagagccatatttaggggctgtattccatccctacaaaagctagaaaatgagtgtttaataaggaaactgtgagtttatatttgagtttggaacaactgagtttaagatacatattgtaccctttttatttcccctgcagcaactaatacaattttaggatctacatactaaagcttcagtaaataaagtattgattgattcaacataaatactatggtttatttctaaatggcaaggaaaaatcacatgtaagaggtttccatttgaaagaattccactattcatcaaaattttcatctattctcaagattgtttattttaaactaggtttggagtagcaaagcatatgaattttatattagaaaacatgagaaggatataaaagtttgttttctgcattctttcaaaattcttattttgaaggccttctgggcaaataaactattggaacttgtcatcatttaaactatgtcctataaagatgaaatcagtaagatttagagcactgcttgcaccgcacagcgcatgttttagtaaatactcaaaatggatttctctcccaaagaaaaagcttaaattaagtaaattactagatgacaatttagcagtatgtgtctcagaagtctgagggtggagcagatacgttgggttccccagcttgccttcggggtggttttattttaggcttacaatccagaagtctagaaatgagtgattcaatctagtaattctggttttgagtctaaaatgttgctctaagaagagtctttcactttctacatttgggataccattattctgcttcactggaagtaaagagaatggactggccaggaatggccaaagatatctggaaggataacttgatctaatagctcccttatacaggtgcataagtagaaacttaacattcttataaaatcttgagagggacaatcatatcgcttagtcacataacaatctattacatagctgagatctgcaaaggaaagagaaattttatatcggagaggggccagggatgaaagaggggaggaccactttgaagcatagaacactctcagagaaggctagtgtagtaagaaggtggtgatccagtgaaaagatgtcaacaggactctgtaggtccaggattcaggatcaggacagaaaagttgctgggaagcaggagatggtagaagaaaaatagctgaaaaggttgtagtggggacatggtgacagtccaaagtccattccaaacctccttgttttgttgcctcaaagttgtgagaggaattaaaatcaacttcagaggtagaatttaagtattttaaatcaatcattctcaaaatgccatggtcctgaactagcagtattagcattagctgaaagtggttagaaatgcaaatcatgaactggccccaccccagacttactgagactctgaaagtgaagtccagtggaccatgtttcaaaaagccctgcagatgggtctgatgctccctcaaacctgggaaacaatggtttaaacccattgtggtaattcaatcccttgagacagtgaaatggcctaggtcaaagggtacacatattctcccagaatcgattttcagatcgcggctagatgcatggcctaagctgacctcatctaaccaaagagaagatttctctctgtattctgcctccctaccccccaagaaataaataatttggcacttagttaccattacctcatcaagagagggaataaagcttagaaagatgctgtctcagttcgtttggggctgctataacagaatgcctaagatcaagtaatttataagaaacagagattcattttttacagttagggaagcagggaagtctaaggtcaagggttgcatctggtgatagcctttgtgctatgtcatctcatggcacaaggtgaaacagcaagaaagcatacatgtctgagaaagaggaagggggccaagcccatccttttatcaggaacccattccattgataattatctatccccaccataacagcactaaacaactcatgaaggcagagcctcttaaaggtcccacatctcaacactcttgcaatgggattaagtttccagcacatagctttgggggacacattcaaactacagcagatgccaattcttcaaatgcctgcctgtagaggacaggcaaagagacaatgttcagtgacattgaatcacagggtcaaccaacctaagtctgccctacccaatgacacttcatagctgagcaaataaacttcctcattgtttaagcccttgtaagtcagattttctgaaatgtttcctcactgatggaggtcacaatcttcactacttgacaagtgtcactagtctggtatcaccaacctaaagtcaaatgctggcgtgaaaaatcaataaaggcatgcaagtgaaaagtcagtaacattgtaggcacaatagaactttaagtaaaatgacaggtgtgaaatataaagagatagtcccaactatccaacaaccaatggagtagatataattcatagtaaagctccctcccacatttctaacaacagaatttgaaagagattttgtaaaacatataaactggtatttcctttataaaatagacagtgcaggataagaccatggaaggaaaactaagggcaacttttggatcacctttcccctctacttacttctataaaatgaagtaaaatagaccgaatggcctcagagaggatgaccaactaactctccaaactcactcaggactggagtttctctagacatgtgcctttcaatgcttaaagcagttacaaacacaccaggatggttggtcactttcctctgtggacaagtcttggaccagaatttaagtcaattagatttgaaaattaacattctttaatgtttagggagagtcaggtgactattttccctgaagaatcatattgtgttgacacccagttacatcctccttcacattgagtgttaacatcattctcacggctgtatctaaattagctttcttagggcactggccaggtgtagcctctcagaatgctctcagctggaaaatggagggcacttccaattccttcgacccatctttctgtaatcatttcaaatttccattttccctagggtattatgttaaatttcattctcatgagagctcttggaaaaagctctgactaaaaactttcccaccaatagcttgcccccaaagactatgcagttggaaactgaaactcacttttgaaagacaaaacaaaagcatccttgcaaatggatggcagactggacgcatgccctgtttctgtccccaggtattctcctcttccagcaacacgtatgatatccagagatcacaaaataaaatgtgaatgttttcactagatcaaataaatgaggcacaaaatagcataagaacttattcattacacaaattgtattagtaaattagaggcagaattggaaaaaacatgtgtttacccacattccagaaatatcttgactctctctatgcctaaaccaactggggaaaattagtagaaacattatataaaaacaaaatacaaaacagtaaatttattgtctctcgaaattaaaataaacacagaaagaaacattacggtttcaattttatcagcattaacaacacaatttagcttgaaaacactaataggaagaaaagaggattgtgatattattactacataaagagccaaatatttactttcatggttcttagtcttttaaccttcttacctgttactaaatacatgatgctctgaaatttgttttggcattactaaagaatatccattgtgtagaattgcaaacactgctggtagtcttgacatttaaggagcaggtggtctgacgaaatgctccagcattctataacctaacaatttggattccatacctgaacaaacagggaaagagtaggttaaatttcctgacccctgaagttttccaaagggcaaatttaataactgcattcccagttggtgattgggaggtgggagagaagagggttgaggaagctcttggaggattaaaaagctactgtgacagctgcccacaacacactatgctggtgagaagcaggatgaagagcaatcaccccagagaattaagtggctgcagtggtgctgccagaacttggctgagaaataacgcttccacaatcttagaaataagtgctgaaatttgccaactgatcttcctcttttaggagaatcaaggttataaaaacagagcaatgcatttgattaatacaattaatacatgctttttgctagacagaacaataatgtttaaacacaccaaactaagcttctttactgaagcacaaaatgatatgatctaactgataaactcaaggttcaaaccctaaggacatcactgcacttgacaagactgtgtattattatagaactaatgaccattctctccaggaccaatgcatctgtgtcattgtcccttgcaatttaatagttaatatgtgttagtgtactatgttgcaggcagtgttttgactaatttaagcctcataacaatgaaaggaggtcggggtactataattgttaccatttaacagataaagaatcaaagttacacagatattagatacatcacccaaagttacctctctagtgactaacagagctgaacttaaacccaagaagtctggcctggatgtccacacccctaaaccactataatatattgttttcctggtaagaaataactcggtcttactcaaagcttgtgacaaacatattaagcttttagaaaatgttgtaaatgtttctttatacttctcatctcatctgattgcctttcaatcagtcaatgcccaggccacttaggatgggcaccaggaagcccttctcccctcgtcaaatttttctcttccttttctactccatggctccccttgcaccatcccccgctgcccttggtggctgaagctcaagcagctgcttgcacctcattccaagtccaggggttcttactcgagtccccatgctgggagtgtggaagtgagcctccctttcttcagagtaaagcatctacaagacaaacttctattttgactctgttaattgcctctcatcactgaagtgttattttgaagtgttatcatgttgaagactcttcccgccagataccagtgaagaggaaaaaaaaaaaacaaaatgaggacgaagaaataaagaattctaacccataaaacacacaaaactgtacatacaatttcagcaggcttgtagactccttgaaacccctgccatagggcaatactgagcaaaagacaactttttaactgaaaaaaaaaacttttgtttattcttgaaaggatgtcgcccatttggtaacagttgggggaaaaagcaattttgttcaactgtatctcaaaagtgcctcccaagagaagatatgtggacatgggacctgtcagggaaacactgagtatgtcctcctgcatagaccttagcaggtgaagatgacaaacagattccttaagaatccaccctgctgtctgcatggcctgaatcacactagtataggagaaagaacactgacccatgttaccagacttaattgttagtctctgcttttctagtatgttgctctggtatcttgaatagttaattcccttctgttcctctcagttttttcatctgtaaaatgaagtcttcagcttaataatccttaaagtccctgtgatcatttactgttggatctgatgttgagagaatcgatgagaggagcttgaaagactccttggagttggtccttggaccagataatccttagactaaacctctacctgcaggagaaacaaacccctgccaacaagaaactcaacaaaaacaatcaccagtttttgtatgtactcccttgaatgtaccaggcaagatgccaggtgtgcactttaaacaaaggacatagaaaaggtgggggactatccccatctgtccccaaaccctctcttgactgcagttaacaagcagactaagttttgcttggcttcaatacacactggaaccaggaattaatcagataccaggccctgacacaacactgagggtgctctgcttccagggactgcatgttcctgccaccttcctagactcaaccagatgcattgaacgttgccttttttgtctgcaaaaacaaacaagtggtgtgtccttagagggaaatgtactagtccacatctcacagcaccaaggtcaggactaggatgagacaaacaggtgactagggcacaaaatttaaggaggcaagatcatgcaaatgttgacgctgcccttgtagaaccctgaaagtcagtgcctccttaaattctatgccctgagctcctaactccagatcatgccagtgcagattccaaacttgcatgaccttgcctccttaaattttgtgccctgggcaccttgcttgtcccatcctgaaccagaccctagtgctgtgtgatgtgaacgagtacatctccctctaagaacaccactgtttgtttatttttgcagacaaggatggcaacattcaatgtacctagttgagtaaggaggatggcaagaatgctcagtccctggaagctgaacacctcattatagtaccagagcctggcatctgcataattcctggttcttatttgtactgaagaccaaatgaaactcaccaaggcccagtcctgcattgtgcactgggttgcacatactcaataagaatttgtagacttgcattttctcttcaactttttattcctcttgatgatcactttaaccaactgctcaagaaaattttaaaaacaagtggagctcaactcaaatttatttttccaaccttaaaatatcaattatttaattttaatgtgcataaaaatcacctgtgggatgtctcaaaaatccatattccacctgttaccgtatgagggcttccataatgaagtaccatatactgggtgtcttaaacaacagaaattaactttctcacagttccagaggctatatgtccaagatcaaagtatctgcaggtttgatttcttctgaggcttctctccatggcttataaatggctgtcttcttcctcttccttcacgagatctttctatgcatccgtgttcctgatctcctcttcttaggacaccaaccatattggattagggcccaccctaaaggtctcattttaacttactcacctctttaaaagccctatctccaaacagtcacattgtcaggtactgtaaggccttcaacgtatgaattttgagaagacacaattcagcccacaccacctcctcactctagcccctacattttgatcccataaatcttaattggggccagagaccttttatgggtttctttctgttttattttgttttgcttcggttttcataaacacctccgtgattctaacaacataaaatatactttgaaaggaacactacgttaggctcctttctcctgaattcccaagaattccctcagggaactctccccacttcccttcctaacttattttcatgagccactcatagtttctccaccagtttgtaagcttggggttatttgtcctcttcttaatagttttggtctatatccaatgtatttaaccacttttcagaggtacacatgagttaatgaaaccaaatttcatcaagaaaaaacataatttgtctttgagtttgcatctcagtggctgagaaacagaatcagagtaaaaaaatctttaacaaaacatgagaaaccaagttcccattccatcttcaggagcagccatttttctgtgaacataggaagcactgtagatcttttaaagaaaagctactagcaaagttgatgttagcacagaaatcttcatggaattaagcacagtccctgccttggaggcctccagacaatgctgaccccttagggctcccatgggaacacctaaggaatacaacgtacttgactcgcagctacagtcaactaaaccaatgatagcacaccaccagcaatgaaatacacgccagttccagccagatgtatctgtcctttctcagtttcagcatacattgaccacaagaatttcaaaagaatacttttctaagagattccactgatcctgtgcttccagtttggctgcaaactgctagagcagcattttttttccagctggcaataacccaaagcaaaaagcaaaacacccaacccacaggcatatttaccacttgaagtttttgaacagaagcctgtgaattaatcaagatcttaaaggcacttttcaatttgtcttttaataacatgatagaatctagaaacgttatatttccttccctctcaagcatagcattccaccctacaacatggtttactcaatgaaagcattttatatgaaattccaaaaatatagaaataagatttataatttcacacttagtttgttttgatcagattttttaaatgtttacaatgttttgataaggaaaatcagaagcaaaaccaaaaactatttctgatttaaaaacctgaaatattaagatgtgtcatgtgataaaatttaatgcatgtatgaagaggttttctgaaagaggttttattttcccaattcaatcaatgtttgtccaagataaggacagaaacagcatttcaaggatgttctcaaagatatactaaaaaagatgcaaagactccaacttacaggctgccactgacagagttagctcaattgaaaaagtaatctacttcaagaatatcaatattttataaatccaagacaatagcaaaagacacaaatgtaccttcagtagaagtagtgtgaccatgaaccaactaataactcaaggttaccctttctgccaaggatatgtgtccaatccgtaataatttgccagtccccaaattgtctcatcagtcatctccaattataaatgtatccagggaactagtctgaaaaatagtaatgcccttttttcctttctcttcctcatccttcttcctttaaatgcagtgtggggatgtgatgagcagcacagcggcgacagtggtaaccatcaagagaaatgcatgatcagcaagatggctgactagaggtgcctaacactagtttcccctcaacataaaaaggaccaaaataacaaataaacaactagatatagactagagcatctaaaagagagtgctggaataccagggagtagagggagccctgtggagcataatgaaaactcaggatgtcagcatagagaagagaacgaagcatgctgcttccatcacatcttctccccagttgagactggtttggagccaaaacgtgcatttttttttttacaggaaaaaagataaggaggggatcctgaacagccttcattaccaccatggatacctgcagtctttgctactggagagtctcacagtgctcacagaccctgagccctgtctagggagatgcctcaagttcatatggcctcactgcttcagagaagaatcccatgttatgcctttcccaacacccacaacccaagcttctaaggcacagcaccatcttgaaactgtagccactgctatctgctagagtaagcactgcatctctaccatcatttcaccaaatggaacaattgcgaccccagtgcaaaagatcactgctcccctgccctcaagtaacaagcagtcctgcatgcagagaagcaaagcccaagtcagtgcacccacagtatacactctcttggtatgggaaccaatccaatgccgcacccccaggaaggctacccctaagccagtggacccactgagttcatcccttcagcttaggaaccagcccagtgtcccaaccccagcaaggccaccacaaatgccccttagcttgagaaacaacctgatgcctttcccctggtgaggtcactcccaaaccagcagacccagtgcacacaccccttgacttcagcaccagctggccttcttcccccaataaagccatgccaccaccaccacaaacccacaaactcctgcagtctaggccactgaggcactcacaggcattgctaatgttgattattgctgaaaaagacttcacatttactacataactgcatcattaaaaaaacaaaaaccacgcacaatacccaaccaccacccaagaactcatctgcaagagaagtctttccctatgaaagctactccataaaattggaaaaggtgaatgttcttgacaccacaaaaggaactcaataattctcgaataactggcccccaaagaaaaggaaatttccaaaatgcctgaaatggaattcaaaacaataatcctaaggaaatttagtgagatacaagagactataggtagacaattcaataaaattagaacaattcatgatatgaatgagaaaatcaacaaagagatggatttttttaaaaaaagaaccaagtagaatctcagagctaataaattcaataaatgaaatttaatatacaactgagggtttcaacaaactagatcaagcagaagtaagcatttctgaacctaatgacaggttttttttttaaataacccagtcagatttaaaaaaagaagaattaaaaagaatgaagaaagcccatgatacttacaggccaacgttaagtgaacaaatgtttgcattatgagggttcagaaggataagagatggagaaagttatagaaaacttatttaacaaaatatagctgaacactttccaagtcttgggaaagatatgggaagttcagatctaggaagttcagaagttctcaaatagatttcacccaaaaatatcctctctgaggcacatcgtaatcaaatcaaaagtcaaagtcagagaattataaaagcagaaagagaaaagtgttaagttacatatgagacagttcccactagactgagcagatttctcagcagaaaccttgcaggccaggagagaatgggatgatatagtcaaaatgctaaaagacataaaaactaccaatcaaaaataccataccctgcaaaactatccttcagaaatgaaggagaaataaagtctttcccaaacaagcaaaatgtggaagaatttatcaccactagacaagccttacaaaaaatgcttaaggaagtgtttcaacaggaaacaaaaggaaagtcattactatcagtgtactgtagcgatggtatgaaaatgtttcaaatatctagtatgaaggttgaaagccaaaatggccaaaagtaactatagctacaataagttgttagggaacccacaatacgaaaacatgtaaattaaggcaacaaaaatataaattgtaggtggaggataaaaatctagtgtatatatgcaaccaaagttaagttgttatcagcttaaaatagtataactacaagattccttatgttagccccatggtaaccacagagaaaaaaaatatagcagatgcaagagacagaaggagaaaggaatcaaagcttatcagtagagaaaaccaccaaatcagaaatataagcaataagaaagaaagaagcaaataatctacaaaacaatcagaaaacagttaacaaaatggcaggaacaagtccatttaataaacttgaatgtaaatggattaaattctccaattaaaatgcacagcaaaagaaacaatcatcagagtgaacagaaaacctagagaatgggtcaaaattcttgcagtctatccatttgacaaaggtctaatatccagaatctcaaggagcttaaatttacaggaaaaaaacaacctcattaaaaagtaggcaaaggacatgaacagacacttctcaaaagaggatgtacatgcagccaacaaacatatgaaaaaaaagctcaacatcactgatcattagagaaatgcaaatcaaaaccacaatgaaataccatctcatgccaatcagaatggctactagtaaaaagtcaaaaaaacaacagatgttggtgaggttgtggagaaaaaagaacacttttacactgttggtaggagtgtaaattagttcaaccattgtggcaatttctcaaagacctagaaacagaaataccatttgaccaagcaatcccattattgggtacatacccaaaggaatataaatcattctattataaagatacatgcatgcatatgttcattgcagcactatagcaaagtcatggaatcaacctaaatgcccatcaatgatagactggataaagaaaatgtggtacatacacacgatggaatactatgcagccataagatgagagcatgtcctttgcagggacatggatggagatggaagccattatcctcagcaaactaatgcaggaacagaaaaccgaccaccacatgttctcacttgcaaatgggagttaatttatgagaacacatggacacgtggggaggaacaacacacactgggcacctgttcggggggaaggagggagagcatcaagaagattagctaatgaatgctgggtttaatacctgggtgacaggatgatctgtgcagtaaaccaccatggcacacatttacctattaacaaacctgtacattctgcacatgtacccctgaacttaaaataaaagttgaaaaaaaaaagaggagagagtaatggaatagttttttttttaagaccctactatatactgcctatgtgaaactcattttacctataaggatgcacaaagactgaaagtgaagtgatagaaaaagatattccacacaaatggaaaccaaaaaaaccccaaagtagctatacatctatgaaataagtagactaactcagaaactggaaaaagaaacaaagactgtcatttcagctgaaagatctattcagcagaaggatataacaatcataaatatatatgaacccaacactggagcacccaaatataaaaagcaaacattattagatttaaagggaaatatagactataatatgtaatagtagcagccaggcacagtggctcatgcctgtaattgcagcactttgggaggccaaggctgtggatcaccccaggtcaggatttcaagataaacctggccaacatggcaaacgccttctctactaaaaatataaaaattagaattggtagtattccatataaatatatatatccatatatatacacacacacatacatatccatatatacatagatatacaaatatatacatatatatacctatatacatatatattcatatatccatatatagatatatacatatatccataaatatccatatatccatatatagatgtatatccatatatatccatatatccacatatggatatatatatatatctccatatatacatatacagatatatatacatatatatccatatatacatatatccatatatatccatatatacatatatatatccatatatatccatatatacatatatatttatgtaatttctcaacctaatctccaagttcaagatacttttgtatgatactaggcatttaatcgattcctaaacaactgagggtcttgggaatttaaccatgtcaatgcagcctttttttatattattaactgaagaaactgggttccctttaaagttttttaaaattagaaaatagaaagaagtcagaagaaaccaagtcaggactgtaaggtggatgcccctgtttgatgagaggaatgagcaggtgcattgtcatggtggagaacgtcttgctggtgaagctttcccaggtgttcttctgctaaagctttggccaagttttaaaaacactctcacaataagcagatattattattttgcccttgagaacatcaataagaaaaatgcattgagcatccctcagaattgttgccatgacctttgcacttgatcagtctgctttagctttgagtggaccacttccacctcttgatagccatggctttgattatgctttggatcatatgggtaaaccatgccctatctcctgctgtaattttttgaagaaatccttcaggatcttgatcttactcgtttaaaatttccactgaaagatctgttctgagatggtatctcattgtggttttgctttgcatttctctgatggccagtgatgatgagcattttttcatgtgttttttggctgcataaatgtcttcttttgagaagtgtctgttcatgtcctttgcccactttttgatggggttgtttttttcttgtaaatttctttgagttcattgtagattctggatattagccctttgtcagatgagtaggttgtgaaaattttctcccagttagaatggcaatcattaaaaagtcaggaaacaacaggtgctggagaggatgtggagaaataggaacacttttacactgttggtgggactgtaaactagttcaaccattgtggaagtcagtgtggcgattcctcagggatctagaactagaaataccatttgacccagccatcccattactgggtatatacccaaaggactataaatcatgctgctataaagacacatgcacacgtatgtttattgcggcactattcacaatagcaaagacctggaaccaacccaaatgtccaacaatgatagactggattaagaaaatgtggcacatatacaccacggaatactatgcgccataaaaaatgatgagttcatgtcctttgtagggacatggatgaaatcagaaatcatcattctcagtaaactatcgcaagaacaaaaaaccaaacacagcatattctcactcataggtgggaattgaacaatgagaacacatggacacaggaaggggaacatcacactctggggcctgttgtgggatggggggaggggggagggatagcattgggagatatacctaatgctagatgacaagttagtgggtgcagcgcaccagcatggcacatgtatacatatgtaactaacctgcacattgtgcacatgtaccctaaaacttaaagtataataataataaaaaaaagaaagaaagatctgttctgtctgcagctgatctgggcacaacagttgtgctctcatcaagtggaaagtgtgatcaacttcaatgtttcagccagaattgtgtaaattaaatgaattgagatgtctgtgatgttggctattgtttctgctgttaaccgtcagtccttttcatccagggcataaacaagatgaattattttcccaaaaattgatgtggctggtctgccgcttcaggcttcgtcttcaacattgtctcatcccttcttaaagtaagttatccatttgtaaactgctgatttctttgggacattgtccctataaatttttcataaagcgtcagtgattttaccacccttctaagctttattataaatctgatgtttagcaaaactcatgttgctctaataggggttcttttaaaattgatagcttatctttcttagtgcctcaaactagattgtgttcaaatatgttataagttagtgtgagtttatttaggtgccaaaaaattgaaatccatgaataatttatcataatacttattttgcatgaactttttgaagcccccctcataagagatgaacccaccactagtatcatactaaatagtgaaaaattgaaagcctttccactaggatcaggaataagagaaagatacccacttttacgagttttattcaacatagttctggaggttctagccagagcaagtgggcagaagaaagaaataaagggcatttaaattggaaaagaagaagtcaaattatcctagttgtagataacatgatttttacatagagaaaacttaaggattccacaaaaatcttttagaactgatatgtcaacttagtaaacttgcaggatacaaaatcacctacaaaaatcagtagcatttctctacactaacaatgatccaccttaaaaagcaatcaagaaagcaattcttttttacaatagctacccccaacaaaaaaatccctagggataaatgtaaacaaagaggtgaaagatctctacagaaaaaaaaaaaaaaaaaaaaagttaaaaaaaaaaattgttgaaagaatttgaagaggggccaggcacggtggtttatgcctgtaatcccagaaccctgggaggccaagatgggcagatggcttgcactcaggagtttgagactagcctgggcaacatagtgaaaccccgtctttactaaaaatacaaaaataaactggtgtggtggtgtgcacctgtaatcccagctactcaggagactcgggtacaagaatctcaacagaagcatatctcatgttcaagaatttgaagaattaatgtcattaaaatgtccatactacccaaagtgatctacagattcaatgtaatccctatgaaaataccaatgacattcttcacagaaataaaaagaataattctaaaacttatataaaaccacaaaagaccctaaagcaatgctgagcaaaaagaatagagctggaggcatcacactacctgactttatactacaaagttatagtaagcaaaacagcacgatagtagcataaaaacagacatatacgtcaatggaacagaagggagaacccaaaaataaatccatgaatttacagccaatacattttttacaaagctgccaagaagatacattgggaaaagaattgcctcttgaataaatggtgcggggtaagctggatatccatatacagaagaaagaacccagacctctatctctcaccacatacaaaaatcaacccaaaatgaactaaatacttaagtgtaaggctgtaaactataatatgaaactactggaagaaagcattggggaaatgctacaagacattggtctaggcaaagatttttttggggtaggacctcaaaagcacagtcatcaaaagcaaaaatagacaaataagattacattaggataaaaagtttctgtaccgcaaagaaaacaatcaacaaagtgtagaggcaacctacagaatgggagaaaatattcgcagggagaaactacatgacagggaatcaataaccagaatatataaggaactcaaacaactcaatagcaaaacacaaataatctgagttttaaatgggcaaaagactgaaatcaacagttctcaaaagaagacatacaaatggccaacaggtatatgaaaaatgctcaacatcactaatcagcagataaatgcaaatcaaaccacaatggggtatcatctcaccccagttgaaatggctattatcaaaggacaaaagataacaagtgttggggaaaaaatagaaaaaaaggatcccttataaactattggagaaatgtaaattagcatagtcattgtagaaaacagtatggagtttttcaaaaattaaaaatacaaatactgtatgatccagcagccccactacttggtatatacccagaggaaaggaaatccatgtatcagagacatatctgcactctcgtgtttataacagcaccattcacaatagccaagatagggtttaacctaagtgtccaacaatggtgaatggataaagaaaatgtagtgtacatacacaatggaatactatccagccattaaaaagaatgaaatcctgacatgtgacaactttaatgaacctggaggacattatagtaagtgaaataagccaggtccagaaagacaaatacctcatgatctcactcacatgtggaatatcaaaaagcttacttcatccaaggagagagtagaacagcggttaccagagacctgcgaaagtaggagggaggaggggatacggagaggttggtcaacaggtacaaagttacagttaggaggagtaaatgctggtttctactgcacagtagaatgagtaaagttaacaataatgtatatttcaaaatagccagagaggtaattttgaatattttcactgatatgggttggctgtgtccccaccaaaatctcaacttgaattgtatctcccagaattcccacgttttgggagaaacccagggggaagtaattgaatcttccccgagccattctcatgatagtgagtaagtctcatgagagctgatgggtttatcaggagtttccgcttttgcttcttcctcattttctcttgctgccgccatgtaggcagagcctttcaccttctgccatgattgtgaggcctccacagccacatggaactgtaagtccgattaaacccctttctttagtaaattgcccagtctcagtatgactttatcagcagcataaaaaaaggactaatacactcaccgcaaagaaatgagaaatgtttgaggtgaaaggtatgctaattaccttgatttgatcattacacaatgtaacatgtattgaaacataacattgtacctcataaatatgtgcaatcatgtgtcgattaaaattttaaaaagagaaatatgcacaagatgaaaagctatcactttaatcctggtggagccaacggatagataaaacgtggacccttgacataccactgggctgatcaacagagctgagaacctcctgtctccagacttctggttcattagttaatgaatgccttgtgatttaagccagtggtgctcaaagtgagacacctagacaagcagcagcatggccatggaacttgtcagaaatgcaaatccttgggcaccaccctagactaaatgaaaaaccctgggggtgaggcccagcaacctgttctttaacaagtcctccaggtgatgctgatgcaagctaaactttgagaacctctaatttaagccatcggtagttgtgttttggttatttttgactgaaagggttcctgactaacatgagcaattgtgtcagatctcagtaagtgtgtcttctctattatttattacacaggatttttcttctaacaatccctattgctctgttgatggcagcagcaggccattcaaagcggctgctgccatggcacctgctgcggtggggtgtgggccctggccaccggtcctcaggtgctgacgctgaggcaaacggtgtctggggcttgccacctgggagctgctgcagtggggccagacagggccaggccaccctccagcaagggaatggcatagtcaggcatggaggggtcccaaggtgaagatgggcccagggtagtgctgcccttgcacatggagcacagggactgggcccagaacatggagtggtggccacacttcaggggcctgggacaggaagcaggagtggcacccatttcccagacccagccagccaagcagctgctgcgcccaccctgcccacggtaccagggtcctgtgcctcagcaggaggctcaatgcggggctgcctgaggccgtgtccataggatccaccccacgtcagggtgactgcagagcctggcactcccacagccaggctggggcccgcaagctgctcccagaggctacccccagcaggattgtgagctggattggggggggggggcacccctgagcaccagggtgtaggaggaacttgcggcaatgtcacccctgcctcagtcgccagcccagccaggcaaggggctggagccctgccccagctgcaaggaggcaaacagggcagcagaagcggctgtgggagtagcagtggctgcagtgcgtcccctgtgccccatgtccccaaggcagctgattgtgctacccccaccctcgaacagcctagcaagacccactcccaggcccagagcctcctctgcaggctcaacctcactccttgtcgtgtcgcaggagcccatgagcacccggccaaaggcacagccaggacttccaggaccagtcccaggagcctcaagttcatttgtgcaaggttggcttggaccaccatgccacccccacctcaaccactgccacttcagggagatgcagaaaaggggcatggccagggctgtgtactctgcagagctggggacaggcaggagcctcaacccacccttccccaacccattggcagggttggagctccccaggagcaactgtagccacccagctcacggctgtgggcctaggcctcccagtcctcttggggcaggagggccccctccataaccgcagactcgggggtgtctgttcccgctgcctggcctctccccactcccagcacctgctccgatcttgaagcagagttggggcactgttgcagcccagctgggtatgtgcaggctcagggaagtgctgacatgctggtcccatgccacctcagcccctctggactttgggcaccaatggagggaggccaagatggggctcgagagcagctcagaactggcctgcagcagccccttggctccagcagcctggatgccatgggtaggaggatgcacacaggctcttgggtgggaaggggtgggtccccagtgaggccccaccttcaggccagggagggcctgaaggctggggctcaggcttctagtcccacagaccagagtggggacttgtggtgccttttcctacctgcctataactgcccatggaccaactggcactcacttccaccactctgaggcccataaaagccccatgctcagccagcacagagcagaggatggagagatgtcaagctgcagagagaagctaccctctccagtgcccctctctgctgccagcagcagatgtcgggatgaccaatggcagagaggagccatccactccaggcctcctctctgctgtcagctgcagagacgatgcaatgacctgcctcgagagacaagccacccactccagggcctcctctctgctgagagctgaactctcaatgggacaatctgcctacagggaagagatacccactgcaggtctcttctgagccgttccaatactcaataaagctcttcatgttgctcaccttccacttgtctgtgtacctcattcttcctagatgcagaacaagaatttgggcaaaggcaccatggccacagaggtttccagccagaaaaatgacaccccaaaaatccagtaacactgtcacaaggttacagtttacttacagtgcacataaatattcagagaaaatcatcatttctttactaaatgttctatattttttgccaatttctaccttgctaaatggtgtgtgtgtgtgtatcatgtacacacgtttgtgtgcatcagaacaattagtcaatattcttatctttgcaggttgaaataatctctttttagtgtagtctactcaaagtcaaattcttactaaagctgatttattgttgtttggccttctcagcctctttagttgcagtgcttagtctctctcagcactcctctcctagtggggggtggcccatgcaattttttggcaatgggatggaagcatcccagatccatattatcttctggctccaatgatctctgggccaatgtcccctgcctacctggtcatgctcctagtgatggcactgatggctggatttggtggttggtgtaacaaaaacttttgttcctcctttgtccagtcccttctggaactttctgtctgcctgactaccctgagatctgtggtctttgcaattccttggagtcttgggtctggaatcccttgtcagtgccacgccctccacacagtgtctggccttgcttgtagcatcacatcatcccaccccaacaagttgaatggttctaagtccccagtgaaggcctacaagaaattttgagtcctgttcatgccatgaatgattccggaaagcaaaactcaatcctaaccttgatctgaagcataaaattcactttgctagtctatcccatgttggtaaagaagaaacctttgagatggtttcattttagagtttttaaagtcctttgcttatctaaaaggccaaagacctgaagttcccaacctaggatgatgttgtttcccaggagacccttgacaatgtctgggcgggcaccttgggttgtcataacttggggggaggttgctactggcatctaatgagcagaggccagggatgatgttaaacaccctagtagattgtggttggcagcatccaagattccttcccctggtagccatgccttgcataaccctctcttcctgcatatggacaggacctatgaaaatgatgagatattgctcttatgtttatgttacttcctatggccaatggaacttggcagatgcaattaagatccctaatcagttgactttgaggtaagcaaaatgagactattctgtgtggacctcacctaatcaggtgaaccttaaaagagacaagaagcagtagtaaacaagctcctgctggccttgcagaagcaaataacccatgcgggggttcttgggaatttttaattcagggggcctcgtggcaggaactgcaggtggcctctaagagctgagagtgactcttatccaataagtcagcaagaaaatagagactcccattttataaccataaggaactgaactctgccaacaatctgagtaagcttgaaagagaatcccaaacctcagatgagaattgcccaagcaacacctcaatttcagccttgtaactccctaagcagggcgcccagcgaggcagcaattggacttctgacccacggaaactgagagataatggatgtatgtgaatttaaatcattaagtttgaggtaatttgctatgtagcaatagaaaaccaatacaaatacacaggaaagcccccacaaaacaaggcattatctgcccaaaatagcaacagtgccactgttgagaaaccatgccctggagggaacatgtgtgtcctccccaccactctttccccctatccctaaagaacagaaggagagaatgtccgagcatttcactttctcagcctgtactcctattttactcttttctaggttcacaaaccacaaagctgtgtacataaagtgtggggagaggagcaggaagcagatatctgggagactttggaaaaaactggaatctcctcaaggagagatgcccaagcaagtagggcagctgtgagccagagaaaggtcaatgggagttagtactgagttttgatgcatgaggtgcaatgaaagcatgtcttcttaacccatgacattgtcagcaacatcttttttcttgttaatgctgtgtgtctttagatttgcttttgagtgttgccaacaagacactgaaaataagagtcctgctttgtagtgagaatgagggtgagaacagagactttcctggttacttgtgaaattcccaggaagacttttcgcagctggcattacgatgccaattattataattttatggatgaggaaattgaggctaacagatgttgggcaattttccaaagttatttagctaatgatccaccaaacaaggattttagacttcaggatgtctaatgatggctcctacaggatcctcactgctctattaccatgtattcattacttccataaagattctgtatagcaggggcactcaatgctggttacactcaaatgacccaggaagcttttaacataactctgacgtcctggtcctcctcttgctcatccccacacctgaacatcagagaatctgatttcattgcactgggacatggtcccaggactagcaagagctcctagatggttctcatatgtgtgcccagggttaagaaccattattctaaaaacatgattctctttagtccatagtgattacaatatgtccaagcccatttgtttctttggcatttttcaaatcatttctctttctgtgatatcaatgattacataatcttatttatcattctaagggcctgggtttgtttgttgttagtttgtttccacaggaaaaatatacagcggcaaagcaggtagcaaatgctaaaaagagatgcagtgatgtaaagagaagccctgtagcactttctcagcaggccatccctcgcaaagtatcacccttggcattcgctgactcttaaactatttaatcttggtcacaagtacacaaacaaggaacaaacaatgtagtaagtcttcaacttaccacttgtaactggaatatattgagacactgccttatctcacaccccttttgtatctaaatattaagaatgactgtaaggatttctttttccttttcttttttttttttttttttttttgagacagagtctcactctgtcgcccaggctggagtgcagtggcatgatttcagctcactgcaacctctgcctcctgggttcaggcaatcttcctgcctcagcctcccaagtagctgggattacaggcacccacaaccacacccggctaatttttgtatttttagtagagatggggtttcaccatgttggccaggctgctctcaaactcctgaacccaagtgatccacgcaccttggcctcccaaagtgctgggattacaggcgtgaaccaccacatctagtcaggatttcttcttaaaatgtatttactattcctttcctttcagaaattgttttttatttttttatttgaagaggacaggggagagaactgatgaagattaagatgctcaggtacaattaaaattaaccaatccccaatcacatttacaggaaacgtgaggtgcctgattttttttccattcatcatgattatttaatttagccacataaacaatgtacagcatccttcatcatctcacagatcaaaagcagagcaaaagtacatgtgtcccaaataaccaacaacaaacattatttttcatggaatcatacttacaaagctgagcaaactggctgcccaaattaaaattcccagacctgtaacccacactgcaatgaacctggagtctttttcttttcattttttttttttatttgagacggagtctccctctgtcacccaggctggagtgcagtggcatgatctcggctcactgcaacctccaccttcagagttcaagcgattctcctgcctcagcctcccaagtagctgggactacaggcatgcgccaccatgcccgggtaattttttgtatttttagtagagatggggtttcaccatgttggtcaggctggtctcaaattcctgacctcaaacgatccacctgcctcggcctccaaagtgctgggattactggagtgagccaccacacccggcaaacctggagtcttcatgtcatctctgccacagtgcagcatgtgggcacaacagacccgtggaagaatcagtacatccaagacctgactcagagtgaaggcatcccagcctacagatctaaactcataacatatatccctaccttgttacatacacctattctcacttatgaacaaggttttatatggtatgatatccacctggtaatttaaggaggtaagcattgataataacaatgatgagagctaatgtccataaaaccccaacaatgtacagagtctgctctcagcccctcgggtgtcttatcccctaagtcctcagttccagtggcaatttcttagagaacacctgtatgacctccctgactaggtcaattgttccaatcacatgctctcctggtacctcaaaattgtatatatatatatatatatatatatatatatatatatatatatatatatatgttatatttaccattataccattttatatacatatatatacacaaacgtatatatacacataaacacatatctacacacatatacgttcatatgtgtgtatatatttatatatgtatatgtatgtgtatatatataatttcaaggtgcaagtagacatgaaacacgtagtagtcatttaaacttcgctgacagccctatgaggtgcatgacgaagaaactgaggccaggaaaagagaataacatctcagtgtgatagggtttgtaagcagtacagcagggatttcaatacagattgtctggttccaaaccccttccatgggaaaaaaaaaaaaaaggaaagaaagaaaaaagaaagtaaaaacgagaggagaggagagaggagagggcattaagtaaagaaacctgcttaatcagtaattcctgcattcatattgcaggtaaattagacctaacttcaaactatatctgggagaaaaaatgtccatgaaagtctttctcactaaaacaaaaaataaaggcattaggctgattggtagaggtgcttgccctgcacaagtctaataatgaccagagcttctgctgaactgtaggaggcagcattgtggttaccctctctctacctggcattcaggacttgccaggccagcctcatccttcctcatttctcatggtctactgtactaccacatctactctgcctaccacctcccactaatcacctgcccgcattgttgctggagtcatcttttgaatatgtacctcttcaagaaatggccatgacttcatattatccttgggatgaaggatcccaaactttctcagtcacagcgattttgtgttttggtcatttttcatggcactctcaagtaaaaacaaacaaacaaacaaaaaaacctactaccctaccgatgtattacttgggtccaaataacttaatagtagtagctcatggggtgtccaagagatgttgccgtttccctcaaacatttaaaatatctcagggcagccctgtaggttcattgtggcacctccaggcacctaagcatacagtttggaaaattcatcttatgaggattcacaccaaaggccttagagcagccatctatgccctgccaattctcctttactcacccgcctggtctcatacttgtggctcccccctcaactctccgtttcaaccacatttctaggccacttacaaataccaccttctacccaaaagactttctccccatccaacccaccaaacctttttgcttaagtgaggcttgcttatcccctaagtcctcagttccagtggcaatttcttagagaacacctgtatgatctccctgactaggtcaattgttctaatcacatgctctcctggtacctcaaaattgtataaatatatatatatgttatatttaccattataccattttatatatgtatatatacacacaaacttatatatacacataaatacatatctacacacatatacgttcatatgtgtgtatatatttatatatgtatgtgtatatatataatttcaaggtgcaagtagagtgcatataagggtgtggggggggaggggtgtgtgtagtgtggatgggtgtgtgtttctttaatgagtttctgattcatgactcactgtaagttccatgagatcaagagtcctatcaaccatagcagccctagcagtaagtctggcacgtagtagacatgaaaaacgttcgtactgaataaataagtgaatcaatgaatctacacttagcagcacaatcagcctcctgaagtgccttagtagtcattacttctggattttgctctcattttgttaacaacaatggccttctatttctttgaccacttctgaatcatacccgacttttaaggcttggcttaaatcctacatcatccatgaagccctccaaaaccacgaagcccacactcgttttgcccttctcagaatacccagtctgcttacattctatagcctgatcttacatagcctcatgtcttcaaagagatgagcaactttcttgaacagagggtgactacttcaaagcttcatacctagtagggtacaattaacacctattgatccattactccacttctttttcttaaggaagaagacggagaaacgtggattaaagtgtcttcacttctctatgtgagtaacgtacctactgtacctcattttcctctgttttctctcttcaggggtcagggtatgctcacacactcccataaactgacttctagcctctctccatgctctccagcagtctctagtggaaatcagggctgcacgacccaaagactcacaataaaagctgactaagctctttaacatcatgactttcaaggcttagaacaaaactatgtaattccaaaagcaaatgttatcatctcaattttacaaaagagaaaaataggggttcaaaatataaaaagatgagcccaaaatatattagacacttgtggtaaattaggttattttcggaaatattcaccccttcctttattcgactctatttccccacccttggctttgggtgggccatgtgaccttctttggtcaaggtagaagtgaggtgctgctaattccaagcctttacaggtcttgtacatttccacttgatctcttgtccttctgccatgccaaggggaagaatatgtccaggtcagcacaccacatactgcaggaagacaagagatgcatattacacagccaccctagtgggaccccgtatgcatagccaaccctgaacgaacccacagacatgttagcaaaaccaactgagatcagcagagctgattgaggccagctggcttcagtcagtcaacataaatatgtaagccaaataagcatttttaccattgagatttccatggttgttgtctttcagcattagctaactaataaatctgttcttagaagaatgaatgaataagtgaatgagtgggggcctccaatcagttggttagtaactcggacatggaaggttttgtgaatcctggtcttttgtttgttctactcctcttgttttctctctagctggagaagaatgctgtaaaagaatttaaaagttaggaaaaaagagatgatgtagcctgggcaacaaaatgagaccccatctctacaaaaaatttttcaaattggccaggtgtggtagtatgcacctgtggtcctagcaacccaggaggctgaggtaggaggatcacttgagcccaggaggtcaagactgcattgagccatgattgtgccactgcactctagcctgggcaacagagcaagaccctctctcaaaataaaaaaaaagatggtggacaaaaaaggaaattgaactaagtacatggactaaagaaataattatgctcgccaggctccaaaatgcaaataatgcctgaatagtatcagttgtttttcaatccctaaaacaaaatgaatttaatctgaataggaaaggcttggattagatctgaaagagaacctccaaactataggagttattaagattgaaatcatgccaccaaatgcatcagaggaatctgtaatatcgtttctacagatttcagaaataatgtatatgctcgtctttgcagaaagttttaggctgatgtcttccaaaggtagacatgcaggcaggagataggctagctctccagctgctagaaaaatacagatttctagactcaaccaccccaagattcaaactaagtaggtagagggaaggcccaggaattcatagttttaaaaggtcccaagagggtctgatatacagccagatttgggaccctctagttgaaggggtgagtgctgaggaacctgatcattgaccttagcagcatcttcctgtggtttcttatttctctgaaggtattgagtgaagactagagtctatcaagcagcctgctggtggatagaaggaagatgtaggaggaaaaaaaggcagtgaggccatttcattcaaatatgttttacaaattttaaatgtaaatttagttatgatttcctcaagtttctcattaatttcttagttgatctttcttactttcttgaagattctgtatacactgcaagtactaggctggccactttgcctcagatcagatttagttaacagggcacggtttatctcagctatgatgcttctattcttgtgttttattttaggacaaattttcatttttattgttaccattaggtcacatttttctcccaattaatgaatatgaatcattggctcaaagtagtcttcttgaagtacaaagcagatatttaaaaagtaatatgaatggaagaattctggataatgtaaatgtaaatggtgaacaggaatttattacaaatatggattgtaaatttgtgtatactaagataacagtgaatatgattatataagagcaagaaagaaaagcatgaatataatatctgttcattgagtcttgttgaactggcaatctgtcaccctagcgagtagtctactgtgaaattttgtcaaatagtatcctaaagaaatcaaaacttttttataatttttggtttgtttttttgaaacaatgtcttgatctgttagcccaggctggagtgcagtggtacagtcatggctcactgtaggcttgacctctcagctcaagcaatcctcccacctcagcctcccaagtagctgggactacaggtgtgtgccactatgaccagctaatttttatttattttactttttatagagacagggtctcattatattgcccaggctggcattttcataatttttaaagcaagtccaataacatctttttgttatagcaacttcacctacacacagcttctaatctatcagaactaaactgctatagattgtccatcccaactgacctcatagatgaagtacagaaaagttaaacaccttgagatcaggagctactgattacaatggccagaactaaagctcaaatctcctagtttgtgtgtgtgtgtgtatgtgtatgcacacgtgtgtgtgtgtgcatgtgtatttgacgtgtagtaagctattcccgtttatcatctcatatcacataacattttatcatattattttcattcaataattctatcacgtgtcttgtatcatttccacccaataaacttggggagatctgggggaaaaaaaaacagtagttggcaaacacagggcctgttgaggacaaagacagtctccatttgaactctcagccactcccaacctactttccattcctcttctaaaagatgggtcctggtttttcatggaaagctcactgtgttctgcgtaccattagccatttgagaatcccctggcatcctattcttaaaattacatttggcaagtctgtgctctacattcggctaaatctacttcaaaaataccccctctggagtttttgtaagcaagttcaaagtcatgtataatgatttgtacatttgtactttcccttacgaactgctaggataatcacctaggcagtggaagccagctccagagtgtcagtattcagctgttagcattagcagtcatggctgataacacattatgttccaaatagatcagctagaagcctatgtgtcagggaacacatgttgagtcctcgataaaatggcaattcaaccacatgttcagttgggtggcagtttatgtgtctagggagtgagctgtgccagagtgcaacagagcagatcatttcattttctcgaatccgtaaattctaacacctcccttcttcctaaaccctcctgaactcacaccacttcacccatcatgaaaataagatatttaccctcactcacaaatctcagttgatctgttttgttagctgcagcatacctcatctgaaaccatttcttattattgttagatttattttttaatttagtgtagtaacaagaacatcagccaaaaaaaaacctgaggcttagtttaaaaaattgtctgagctgagccaataattgtatttaataaaacttgagtattttttcctacaaggcacttactctgtacctactttttcttcataagcaagtataaaacaatcagttcccaagtttcccattttatagctgattagaaacatttaaaaaatggaattgaagaggtaaaatttgagtgaacaatggacaactggacatcaagggagacgataaaaaattaaaacgagagattatgagaatcaaaaacataattcattttatgtaatgccagataacccaataatcttcagtggcccagaaggcaccagattttctataatatcaaataatttatgggcctaataatagcgtgagtaaaggtacttgtcacaaggcattcataaaaggacaaaaaaggtgaaacagcttaatcatccaacaatgaagtaaccattaaaattataaatacccatgcaatcaaacattctacaacattttctcacttttttgttgatacataataattgtacatattttggggatatatgtgatattttgatacatgtatacaatatataaagatcaaatcagggtaatcgggatatccattacctcaagcacttgtcagttctttgtgttgaaaaattccaattctcttctagctattttgaaatacacaatgagttaatgttaactatagcaaccctattgttctatcaaacactagaatttattccttccacctaactatttttctaaccattaaccaacttttctttactactcccttccccctacttttcccagccttgggaaccaccattctatcctctacttccatgaaatccactatttttctgtggggtggtggggcagtggaggggaacagagtctcaatctgtcacccaggctggagtgcagtggcacgatctcagctcactgcaacctccacctcctgggttcaagtgattctcctgcctcagcatactgagtggctgggattacaggtgtgcatcaccacacctggctggcgttttttttttttgtaattttagtagaaatggggtttcaccatattggccaggctggtcttgaactccagacctcaagtgatccgcccgcctcggcctcccaaagtgctgggattacaagcatgagccaccatgccctactgaaatccactattttagctcccatatatgaatgagaacatgcaatatttgtctatctgtgcctagtttatttcacttaatgaactccagctccacccatgttgctgcaaatgacaggattttattctttctttctttctttttttttttttttttttttttttttttttgagacggagtcttgctctgtctcccaggctggggtgcagtggcacaatcttggctcactgcaacctctgcctcccaggttcaagtgattctcctgcctcagcctcctgagtagctgggactacaggtgcatgccaccatgcccagctaatttttttatttttagtagagacagggtttcaccatgttggccaggctggtctcgaactcctgacctcaagtgatccaccctcctcagcctcccaaagtgctgggattacaggcatgagccaccatgcccggcgatgacatgatcttatagttagaaaaacctcaagactcaaccaaaaatctcttagaaactgataaatgaattcactgaagttgcaggatacaaaaccaagcaaagacatcacaagaaaacaatggatcaaccaacatcctttatggatatagatgtaaaagtcctcaacaaaataccagcaaactggagccagcaacatattgaaaggatagcatgccatagccaagtggaatttatcccagaaaggcaagattggttcaacatgcaaaaatcaaccaatgtaatacatcatattaataaagaacaataagaacatgattacctcagtgatggagaaaaagcattttacaaaatctaacaacatggatgataaaaacattcaacaaacaaggaatagaagctaatctctcacctgataaaaaattcacaactgacatcacacttaatagataaagactaatagtccccccaaccaaagatcagaaataaggcaagaatatctgctgtcaccattctatccagtattgtactggaagttctagtagggcaattaggcaagaaaaagaaataaatgtcattcagattgaagaggaagaagtaaaactgtctttatgtgcagattacattgtcttctatgtagaaaatcctgaggaatcccaaagaaactattagagctaataaatgactgcagcaagctttcagggtagaagatacaaaaatcaattatattttttaatactgaatgaataatttaagaatgaattttttaaaaatctttataatagaatcgaaaataagaaaatacttaggaacaaatttaacaaaataagtgtaagacttatacactgaaaatataaaatattgctgaaaagaattaagacctcaataaaaggaaagactgtttgtggatctaaaaactaattattatgaagatgacaatacttcctttattgattctacgcaattgcctataaagctctcggctgcctttttttgcaaaaactgacaaggtgattctaaaattcatatagaaatgcatgggacccagaatagccaaaataatcttgaaaaagaaaagaaaagctgcataacacacacttcttaatttcaaaacttactacaaagctactatgatcaagactgtatggtacctacataaggatagacatacagattaatttgataaaatgagagtacaggaataaattcttacatttatagtcaactgacttttgacaaagatatcaaaaaattcaattagagaaacaacagccttaacactgatgctgtgacaaatgagtatctacatgcaaaaaagagtaaagtcaaattcctacctcacaccatacacagagattaactcaaaattgatcaaagacctaactgtaagaactaaaactataacattcttagaagaaaatataagcataacatttttattttgattttaggcttctttatatataggcctgagtggaaaagcacaaactgtctttcctttgctctcacaccataacaatcaacatagacaatttctgtgacccagagtgtgggagctccaccttaccagcaagcaagcaatgaatttgccatgggacacaagcggggtgtcctgcaatccgactcaattctgatgctatctacctggagatagcagcagatcccacaggtcgaggttgaggccccaccttcagatgccaattgcaagccccagattgtttttacctgcacttctgactggctgcctatacatctgggatcccactaccttctccttgaggccagtcaatttgctagagtggcttacagaactcagagaaacacttacttacctttaccagtctattgtaaaaaatattacaaaggatacagataaaaagatgtatacagtgaggtatgggggaaagggcatggcacccccaaggaacttccacatgttcagctatcaggaagctctttgaatcctgtgctcctgggccttctatggagacttcatgggataggcatgattgacaaccatgtagaaatgtgacttgaccaaaagagtatgatctaatactaatagactgagtaaggaaacccagcagggcgtgtctgttcagattcctcttggcttctctgtgcagtttttcttcctccagagtgtggggcaggaccccttctaaaatgggggtttatgacctaaaatcagaccaggtaggtcagagaatttctttaagggcagttcaaagacaaaagattagagtatatttacatttttttccatgacctgctttggggagaaaatacaagagctgcgggagtatgagccagaagctgtgaatgaaatatatatatatatatatatatatatatatatatatatatatatatatatatatatgttttatatacataaatatcacaattgtggaattcgtccattgtctgacaaatgagttgtagatattccaagattctaagattatcacgtgtttgactttgctcataaaggttttgccaggcaataatttttgtatttttatgtggttaaatttaattaataatttttattgcctacatattttgtaacatatctaacagggccttctacatggtgaaattattaaaatatcaaagaacagggtggcagagactgctggatgtccaccaaaatctgttttgcatttttaccatcaagaattgaagttgagcaaatgatgacgcagctcaagaccttatttcccaatatcccttgcatctatgtgaaaccacatggttaagtaactatcagtgaaatgtaagcaaatatatgtaacttctagggatggcttcctcagagtaggaacacaatgtgcctgcaaactagcttcactcctgcagcaggggacattttcctagcacatgtgatacagtaagagggaaggaaattgtatctttgacagaccatggggagcagagctaatcaccactctaaaccattgactccaagatttttattttaacaggaaaataacttactgttttcttttaaaacaaattgtatgtcctctgttacagcagataagatttaatgctgttttcttttaccatttagcttttagatcaatccagaattcatcctgagataaggtgtgagttatgaatccaaacacacagttatttctttctaaatggcttcattttttcccttctgaaatttgaactgtatcatttactaaattattgtatagacttagatctatttctggactttctattcaagtgccaataaccactacacctttatgatgttttaacatcaatccagtagtactgtgtccttgttttgcttgcaattttcagactattttttcatagctgttcttgttgcttattattccataatttaatttataaattccaacacaattcccaataaaataccaatattctatttttaattggcaaaactaattctaaagttcattgagctttctttgtaatgagaatacatttctttagtgttggaattggaaattttacttgattcttctttaaatctcttttttcctatattgcattatccaccaccactcccaatcctagtccttgggtttcagttccatcatgtcttaataattttaaacatatttagtgtatattctctttatatcctcattgtaggtatattatctcaaagtctaatattctagaatccagcatcctgatctcactgtttatgattccctgtctcactaattttggctcatatcatcatttggtcattttgattagtaattattaagggtttatttttctgtgaaaaatcccttatgcctcaatttgtatctgcttcttcaagcagcttaatgaatatcactggtatcagactaatttgcatatgagtttcttttcttcagagtctcagactaccgcacttgtaaaattcaaaccccaaaactatgtgatacggacacctacagttttaaattcccactaagaacctagcaagaaagggaacaaatatttggggttctccctgttctgttattttctaatccacagatgggtgccacctcttccaggatcccaacttaaagatggtgtgtaggttccaggatctatctcttatggggcccagacctcatcccctttcacctcacagatgttaagtccaagccctaactccaagcctgacagccccagcccaagcagccacatcagctcacatgctttccactctggtgataagttctggctttgtttccaacacctgggatttccttttcttttcttttctttttttaatttaaaaaagttttattgagccaaaaacaattcatgaatcaggcagcctccgaagccagagtaggctcacaggactccagcacagccttgtagtggaagatttatagacagaacagaaatggaagtgagggacagaaacatctggattggttacagttggacatttgccttacttggcactttagtcccttctccacgactagcagcagcagagcagtcagagagacacccagagtcatgatagctgcacactgcctggggaaatgatgcaacactctgagacccaaaagagcaatttgtaatattaccaagtgattctgtttattagagtctggttattatgatttatttaaaagaaagtagaggataatattagcctaaagtccagggaagccagtcacaatcacgatactatctgctgattccaatgtagttttaacatttcttatccctcaacttttatctctagaatccgaatgaacaactgagtccaaaataggcctcccaattctgttcgacttccccttaatgctcctagcctgaaaaagttaacagattaatagtgatttattagtgatttatttcagagtatccttctttaaaataacatgaagccaatagaagatccaaaaacatgagcggtccatgggaaaaatcctgccacagatgtgaggtatggaagggaagtcagagtttgttttcccattgaatgtctttagctgaggcaggtaccctccagaagcccacaggtctacctattctcattgccttatatggacccaatcccacagtttactgttcccatctgcccagaagagagtttagtctttgaccatagaatacattcaagaacatttcatgtgccaatcttctggttctcaatgaagttttaagattccctagacaccaaattataggaactatagaaataatacacattgtatatttgcataaatttcatgtaaatttctcctttccttgttctattgcctggacacagcttcttacatgcctatatgcctttacacactattttcagtctttcaacaatgaattccttcaaccctactcccactacagctttctggccatgtcctactcattttcaagtcatagttcaatcattgctttcctgagaaatgcttcctgctgccacagggcaaccttaaattcttcctccactacgacttatatatatgactccatcctttactactattggtttgtgacatggttaggctttgtttccccacccaagtctcatcttgacttgtaatccccataatccccacgtgtcaatggagagaccaagtggaggtaattgactcatggggtggtttccctcacgctgttctcatgatactatgttctcacgagatctgatggttttataaggggctcttccccattgactcggcacttctcctacctgctgtcttgtgaagaaggtgccttgcttcccctttgccttctgacatgattctaagtttcctgaggcctcctcagccatgtggaattgtgagtcaattaaatctctttcctttctaaattacctagtcttgggcagttttttatagcagtgtgagagtggactaatacagtttgtatttaaattcctcaggagtagagacctttttttttaatgtctagttctcttatacctaacatcatacctagcacataggtatacatattaaatttgtgaaacactgttctagcacatagtatgttctcaatatctattcaatgaattaatgaataaatgaagaggtgtaatttagttgaatcacactgtccctgagactaatgtcacactttcagtattcagatgtgcaaataagtttaacttttcctgagagcagtcttcacccttgaccagtccagcactctgataactttttatgagataagtcaaatttcgtatgggatgactctgtcatttctttaccactactggaaacaggcactgctcctgggaactgctggtggaattatctctgagtttaaatgacagcatactttcttggagttgaaacatccattatcttaggtttcctatggctgtctaaacatttacagtcaattgctagtgtgtgctcacccatttcctattgcaatctatgttacataaaaaaaagaatatcactttttaaaatctttctcctgtctggaggtgagaagtttgtctctgtcacagatgtaaggtggtgtgaaatcaaaatgagactttttaggtttttattctatgagctaagtagcatttctacaggattttaccttagagacctcaatctcaaactttttataaaagtgtactttttccaacacagagattgtttccaagtttgatgcttgacccaaaagccacgctggtataggaaaattgagtccgattagtgttcagcctctaatgcctggaattgttgtgtgtggactagcagcagtgtcatttcctggaatttggggtcccagaccagaatttctcaatcaaatctgtactttaacaagatccccaggtgatctgaatacatattaaatgtgggaaacactgttctagaatttccatctgatatggtttgggtctgtgtccccgcccaaatttcacgttgaattgtaatccccaatgttggaagtggtgcttggtgggaggtgattggatcatgagggccgacttccaccttggtgctcttctggtaatagtgagttctcatgaaatctggctgtttaaaagtgtgtggcacctccttcttttctctcttgctcctgctccaccatgtaggagaccgggctccctcttcaccttccaccatgactgtaagtttcctgaggcctccctggaagccaagcagatgctgcctgtggaaccatgaaccaattaatcctcttttctttataaattacccagtctcagatatttctttattgcaatgcgagaatgaactaatacactattctaaagcacaagcttcctccttgaatttctgctcagtgcccagtaagttcaaatacgtgtattcgccatttccctccccatccagatcatgggtcagaattgcttttcttttttatgcatgtatcccttaggaagcttttagctgcaagtaaacacgaacaagcaggcacacacgtgcacatatatgcacaagctcagtaactcaagaggatttattatctcatataacaagaggtactaagatgaagaagttgcagggctagtcaattaggcagcccagtgagttcaccagggacccaatgttccttctgtggttcctctcagccaatcttagcatggtctcctcaggttagttccctttattgccccaagatgtctgccatagttccaagcatcacatgcagaaacgaaaataccagcagcagaaaataactgtttcctcatgtccatctatttttaagaacgaggaaaacatttttcagaattcccccagcagatttccctttgtatggcattggccagaatcatatcacatgacttgacctggacctatcattggcaaggggtacagctcctccttggctggcttagaccaagcattgctcattcttagtggccgattctaaagtgtgcttcccaagacagataaagagtggaaaatgtacaaaatactgtttggttaccagggaagaatgtaggcaggaggtggggaggggaatgaggtataagcagtagcaggatttccaaaagcaaaattaataatcccaagcatggctgggcgcagtgactcatgcctgtaatcccagcacttttggaggccaaagccggcagattgcttgaggtcaggagttcaagaccagcttggccaacacaatgaaaccccatctctattaaaaatgcaaaaattagccaggcgtggtggtgtacgactataatcccagctacttgggaggttgaggcaggagtatagcttgaacctgggaggcgaaggttgtagtgagctgagatcgtgccactgcactccagcctgggtggcagagtgagactctgtcaaaaaaaaaaaaaatcccaaacataagtcaaataaacaaaaggaaatttatctttttttccttttaactgaaagaacactggttacaataggcctatgataggactcaccgtcagatctcagcctcaaataactagcacagtctccctgagcactcccttttacctgctcctgctgcccagtcagctaaatccaaccttgacccttccaatggagcagggccaagaaggggacacagaagctggtgttctgccattgtgctgctacttggatctctagggcctaacccagcaaaccccggcaggttttttagaacagactccagccattcagtataattcttctccccaccactagtaagcaatgagatagggttgctatgggctggactccttcagccaaataagtctgcaattatttgtggctatagcaacattatttggtgtttcagatgggaggaggaaggaataagaagaaatacatacacacacacacacacacacacacacacacacacacacacacacacacaccagaaagcaagatagttgaagataataatactcaaatattagcatgcctaagcatcatctacttcacaggtcagtaatgagaaggaaaaaaatccagatttttaattggcatcccaagcgattccaatgaaagtgctcttttaaatcattcttgagaaagagtgttgagctagggaaacaaagtatttattttctttatcctttgattcaatgttgccccaatatctcttcggattaagaacaaggatcattttcctgctacagaatgctattcttactagggtaggttgtctgttccaacccagggatgaaacaacaaagtcaatggaaggggtgagagagtgtgtgtgtgtgtgtgtgtgtgtttgtgcaagtgtacacaagcactcagcctttgaaacagacttaatcaactaccacagaatggtggaacactgggttctggtcccagctctgcctcttaggagccaactgacattgatcatatcacagcctctctagctctcaattttttcatctgtaagatggagacagtaatacctaccttgcttcacagaactgcaggaggactcaaataaaaaactgtatgtgaaagaaacttgtaaacaggataacgctataaaaatttattccttttcaatgttgatttataaaattatttccccctcaatatcaaaagcctttaaaattttatatttctgctctgtgcaacatcctcctcatcttagtaatttcataagagctgttcattctgtttcactggcttctatccacatggcaacaaacagggtcttatcttcactcactcactcataggctatatgagagtaacactggcggtattaacttgaaatgtctggtctggaatttttgacttgccctttgaaagaccctgaaagttcaaaagtaatatatttttggccgggcacggtggctcacgcctgtaatcccaggactttgggagactaaggcaggcggatcacgaggtcaggagtttgagaccagcctggccaacatagtgaaactccgtctctactagaaacacaaaaattagccaggcatggcagcgcgcacctgtagtcccagctactcaggaggctgaggcaggagaaccgcttgaactcaggaggcggaggttgtggtgagtcaagatctcgcaccactgcactccagcctgggcaacagagcaagagtccatctcaaaaaaaaaaaaaaaaaaaaaagtaatacatttttgtccagtgtagccaagaaaatgctggaaacaagagctgtttccgtttctgccttactaacatcacaaaaaaaaaaagaaagaaagaataaaacctgccaaaaatactattctaaatgtttaaaggagactttcaaatgggagatgaataaaattatttccataaaagataaagatagaagcatcagaaataatcaaagaagcagcagcaactttttactgaatcaaaaattgatcacaatgagaaatatatcacttgctcctacttacaaagagttgttcctattctcttcggcaacactgaactatgttttcacgctaatacatccagtaaaattgcttcctatttttatttgtgattttcattactgattccacttgggacagaaataaatagaatatgtgcatcaggatctccctagcaattttgcaccaacctcatgtggttctgtcaatgaaggcaattataattctgaatgaatatgcttgatgttcacttagcaggaaactgaactcagagaagatttttgccctttcattttaatgtacacaccaggtggcacccaaagtagtcaaatacaaatgtctcccaccctgtattcaaaagaaataatcatagtaccaggagctatcaaatcagaacattttctcgggcacggagtgacataaagggataacaatatctaagggccacatacctgttgttgcccaaagacacaaggcaggaaccataaaccaaaaagaaacacctgtccaggctgaaggcagcaggacttatttaccagataattgtatccataagtccttgcactgcccaaattctcactttacacacagaaacttcaaggactaacttttatgattcagattctagttggctttataatggcccacccaaagataccaggtcccaataccgggaacctataaatgttactttataaagaaaaaaaagatcttgcagatgtgattattgggaaagttgtcctggattatgcaggtgggctttaaatgcaatcaaaagtgtccttatggcagggcacggtggctcatgcctataatcccagcattttaggaggccgaggtgggtggatcacctgaggtcgggagttcaagaccagcctgaccaacatggtgaaaccctgtctctactaaaaacacaaaattagctgggcctggtggcgcatgcctgtaattccagctacttgggaggctgaagcaggagaatcgcttgaacccgggaggcagaggttgcagtgagccaagatggcgccattgcactccagcctggccaacaagagcgaaactctggctcaaaaaaaaaagagagggggtgcccttacaagaaagatgcagagggcaattatgcacacacagaggagaaggcagtatgatgagagaggcagagattggagtaatgtgggcacaagtcaaggaactctggtgagcaccagaagctggaagaggcaagaaactaaaccttccctagagcctccagagagaacacagccctgcctacaccttgacttcagcccaaggaaactgaggttgaacttctggcctctagaactgtcagaaaataaaccatccagcgtgcagtaagttgtcacagcagtcacaagaaactaagacatagacccaagtcatcttatttttctacttcccttccagccccccacgtcatccaaactaaatttgccatccccattatgcatacctatgtctctatgctttcttgattagaataccccatttctctgaaataaaccttatgcatcctcaaaaaataattctcatgtcacattctccacatttgaggttgagatttcaatgtccaaatgaagggctctccaaagcagatttatacaaccaccaagatcaaagatagatttaatgcttttttttaagataattaacttttaattacatgtatagtatagcccggttcctagagaagtttccggtttgttcagctcagtcaaaccatggcaggaggaggatcagacccttatccccacacaaattgaccaaatccttcaccctctgttccctgtggcctgtgagtatctcagctgctggacaatgacccctagtgatggtccctccgagttccacactctagggtggctggtgccaaatcacatgcaggcctctttctgatattgtggctggtggtcctttgtctgattcccactttgagggctgtctgctcctggctccatttgagatgccctttcaatgccttcttccctcatctcccaatgccagtctcaatctggagttggggaacaaaaaaacctgtttcacaccgagccccatggttatttttttattctgtatcttggttttttaaaataatttttaaaattaatctttcattgagtaagcaaacaacatacattataagaaagaaatttaatcagaaggatataaaacagatgtgaaattttccttttcatctctcccaatctctcctccatctctccagagttgacaatatctctaaaatcctgctaagtattttctctaactacattatcatatatatgacctgtatgtcctaaaaagttattttatattttattttaaaatacagcatacaaacaaggtgtataagaaaacatacatggacagtttaaagaatactcaaacctgtaaactcaccacccagataaagagagaattaacatccctcagaaaccctcctatgtctctcccaaattgcattccctttccagccccttaaaggtatcctgatttttatgtacatcattcccttggtggtcattagatttgttcgtgattgttctggctctctccttctggccacttggtagaactgcacttgcccacacactgatactacgcttggttatgtcacttttttggcaaaagaaacgtggtcagaagcgactgggttgaagctttcaaaaatcaatgtgagctttgccacatcctctttttctgtctgcctctggccatgctctggatggtagctgctccgcagctcaaatcctaaagaaacaaaaccatgacttcaagccactgaagttttgggattgttggtgaccacagcagagcataggctaccctggccaatacaatccctgtgcttctcaatatagtttttatccattgagtacaactgcaaacagcgtattgttcagtttgactgtctgttatctttacctaactgcaagccagtgacacacactatcctctgattttccaatgttttatttttaaagttagtcatattgtatatgagttgaacatgttgtatgtagttgttaatttttacaactatatagcattccactgcatgaatataccatgatttatccattccaacattgatccacacttaggctcccattggggaacattacaaggaggtatcctttttaggagtaagagtttctctagatggatactcagcagtagaatttcacctgaattccaagctagttcatttcacttttatataccctaacctacacataccaggaataatttaaggccaggatatttgtttctctttctgtctacatgtttctctcatttgaaatttgctgtgctgagggcagttccacaccaatggatacagtcactcacagactaacagcacgatggttaagaggtggcatccctacaccctcaaacaacattccacagagtttctcttaaattacatttatagtttttcaaagggaaaagtaagtcctcttcaataatttatgttttgtttttgaccctctgttaatatgatttggagacatttactttcttctagacaagcaaattacattaaatctaatttaatgccgtgaactatttagcaactattaggaatatggaatatgctgggcattgtgaaggcgatcaagtcacacaaaacaaagtcctggctctcaggatacagccatgatcctagttgagaaaagatttaagcctttccatccattcaaagcaatgtgaactcttataatggcacctcaccatcgaaatccagacacctggcaactttgtctgtttaggttgccaccaagaagcaatccttttgtaagaaagatgccacaaaatgcatgcagtatgcatagggattcccttggtccttacagcctattaatacttttagtgcccacagttttattaagctaacatctggtttataaggctaccacaagtcaggactagcaagtaaaaggcggcaagcaagagcaaggacaagtgacagcaaacttgtgacagctagggagaagaccaaagagcataaaatgcagataagcacactgacacatcaagtgaggcatacaaggacgagctgcccttcacgaatcaataagtcctgaggcattctgcatttcagcagagcctagaaaacagctgtgcctactaatggccttggtgtatcaggaaaagatgatgcaggcccagtctattctatgtaagcagcaaagtgaaggtaaaatacaatttaaaggtcttctatctaaagagttatgctgttagagagctctgaacctgaagtcaacatattttccaggtcaaaatctcgggtatctaactattatttcttttaagctctattatatgccatgagctatgtacatgttcctccacctcaaagacaaaggccattatccttattaaattgagacacagagaggttaagaaatgttctcggtcacacatatgccacctagttaatccaagatacgtactcttgtctttctgactccaaaatctatgctgtgtcattatcccacgtggctctatgtatccaaaagtcacctttctaaggttactaaaatggtacatttttctctctgtacattttacaaaattaatagtaaaaggtttaagtttataacccagagttatcagtatgcttgagttacatatctgccttagggaataattagatatctaggttgctactgtgtttaatttgtacctaccatatgccctggtgccctgtggaggaatggatgaagaatctttcggctgactgctgagttccccagatcctgagatcagagactgctgggaggtaggggcgggcttcccaccagaacttctggaggtcagcctggtagcagatgaagcagggtgtcctggcccatcccaacacagcaatggaggctgtgtcacataagcatatttattcagcaaatgcagacttctgagttttgttctaaaaaggcagtttatggaaagagctgaagtagaaaagaaagctcctgggcacacccagcagcatccttgggaacaaggacagatccttggaggccacaaacacacctagccacacattcataaagagcagaactagaactaaggggagaccagaaatctcagggatcaatacataacaatttaattcaatacttgaaaatatagcaatgaatagaaaaagttaatgactaacaaaatattatgaagtaggattcatattactaatttttccctttgcttcaggattcaatagggctttgcacaacagagagctaacaaaagtggttttttttaaaaaggagggtgattacatggttatagaaagctaatgatttgggagataatttttaaattatcaatttcactaaatgaaggaaacagtaattatcttcttgcagtcttgttaagtctgggagactcatgcagcatgaaatagtaattctcaattataagtctgctcaaaacatccaccatgagaggtctggccaaggaacaatcttaaaagtagcttaaaggtactgtcagattgcagagcccagtgatgctgggcttggccacatgactgactttggccagtggaacatgggcagaagggaaagactaacagtaccaagcctaggccttaggagacatcaaatgtttctactctcttcccttgcagttctaccattgtcatgaataccctgcttgtccccaaaaagtgagagtcacgtgaatccaagataaactaaactcatggctggaagccaaacccagccaaccatattgggatcatcagagctccccagccactcctgaggtgcaaaagtggacaatagacgcttattcctgtggaattttgtgactgtctgttacacagcaatagctcattgatgcattctcagtacaccaaaatattcagtagcttcttaagcttttgtatggatcattgattctcaaccctgagtgcacaataaagtggatattcaattgtcagaataccaatgcccaagtctcatcttagactggttgtttcagaatctctagtggtagctcctggatataaggctttatttttagcttttagcttttattattatttttacttgacccataagaattgtacatatttatggaatacggtgtgatttttttttcagtttcccagataattttaaatgtgcatccagggtcaataacattgatgtagatacgaaggtacagaaatatctctagcatgaagaagtgcatctgtatccccatttgctgtgactaaacaatccctctccactgccagagaactttgatgggaggcaggtctgcagggggagttatacagtgtccaaagtgtccatgcagtgaggtgatggctatgcctggtgagctacacagaaccagaggactacactagaatttgtgtgttatgaaaatatttgttgagatcataagttgaaacagatggactaataaaacagactagatggagaatagaagttaacatgtggagtcaaactgagaggaggaaggatagggttgatgaaaaagagaaaacacttggactagaaaagcaaaaattggctagaagttttccatggattccaacggcattggaatcacccaggaaatgtagaatctcaatgcctatcccagttctacttcatcagaatctgaattttaatcagatttccaggtgatatgtatgcacatgcaagtttgagaattgctactttagcaagttccagaaatgaagtgcatggacatccagatgatttccatactctgctgctgtgtgattgtatagaccagcacagtcacactgggattgagatgggacataaagtggcaggggtgcatacattcaacgaacccaacagctattccaaattatttaaattttaaatttaaaagaatgagggttaagccagaagaaattctgatttacaatagtgagacccaagcacagataattttcaaaagttactgagatgattctaaatcaacagccaaagttgagaatcaccactttctgccctttaaaattaaaacttgtccttatcaactatgatgctaaaatagattagtatatatgctttaaaacttctatactgaaagcttggttcatacatgacttctatctacaaaagctaatgagaaagcaaagattgacacaaaatattttactttgtcattacattgtctatttttcaagagaaaagaacaaaacaaagtataattgtatcatttagtgttttggccaaaaacacagaaactcttctaggaaattccaaataggaagtgatttaatacacagttaaatgattacaaatctctgaaagaggtggaagagtcaagctcagcccacactgttgctagctctcaagtatgccattcattttcagagaatcaagaaattgctactattctctagacctggaattggaaaaacactactgacgaccactgatgtgtggatccccagggtggtgatacgcaagagaatacctaaaggatcttgcaagggttggtgtcctagtaagtccaggctgctatagtcagttagcaaagactggatgacttaaacatggattttttcatagttctggaggctggaagtctgagacaaaggtgccagcatggtcaggctcttgatgagggcccccttcatggttatgtcctcccatggtctctcctgcatgcaggtcgaaaggaagcaagctttctcttgtctctttttataaaggctctaatcttatcataagggctccaccttaattaccttccaaaagccccatcgcattgaggattacagtttcaaaatatgaatgtagggcgtacacaaacatttagtccatagtagatgaccttccacatgttgtataatcacagaccatgcttccctttctcctttgttgatgaaaaagccaaactctgtaaaatatttgaacaaatttattctgagccaaatatgaggcccatgacacatgacatagcctcaggaggtcctgagaacatgtgcctaaagtggttgggttccagcttgattttatacattttgaggagacagaagttacaggcaaagacataaatcaatacatgtaagttttacattgattcagcctggaaaagtaggccatctcgaagtgggcagggggaggcttccaggtcataagtggatgcaaagatttcctaattggcaattggctgaaagagtaaagttttgcctaaagagttaaagtcagcagaaagaaatgcttggggttagaataaggtgggagttgggggtggaagccaaggttttgctacgtagatgaagcctccaaatagcaggcttcagagagaatagatgataaatgtcctttatcaaaccttaaaaggcattagactcttagttagatctctccaggatcaggaaaatacctggaaagggaaggggattctctacagaatgtagatttttcccacaagagacagttttgcagggacatttcaaaatagatcaaaaaatgtattttggggtaaaatacttccatttctttcagggcctgctatctcttaatgtgatgctatcctagaatcaggctggaatatggtactttattgctacaaacagactgttttgtcactcttaaaatatctggtttaatgttaatgctggtcagttgtgcctaaattccaaaggatggagagaataatgaagcatgtctgacccaccattcccatcatggcctgaactagattttcaggtttcatggctatcttcttgcctgagataaggggtcctttcagtcagttggagggcttagaattttggttttggtctacaccttccaaatcatgaataaatcccctcccaccccattagtagaaactaaaccaaaacccagctggccaaggattcttaaaatttcagctcccaaacttccaaataccacaatagagaggagagaaattcagcaaaatagcacctgtcagtaacaaaatggtagttagaaagaccaggttgctttattgaaaaacaagttggcaaattgatgtaaagaaataatcatctggccaggcgcagtggctcacacctgtaatcccagcactttgggaggctgaagcagacagatcatttgagcctagaagtttgagaccagtctgggcaacatggcaaaaccccatctctacaaaaaaaaaacaaaaaaaaaatacaaaaattagccaggcatggtggtgcatgcctatagtcccagctacctgggaggctgaggtgggagggtcacttgagcaaagaagagggaggttacagtgagccaagatcctgccactgccctccagcctgggcaacaaagtcctgaaaaaaggaaagagagagagaaagaaggaaagaaaggaaggaaagaaggaaggaatggagggagggagggagggagggagggagggagggaggaaggaaaaggaagatttgactaacaggcagagtttaagagcaaactctagagtccatagcctgagtaccaatcctggttcaaccccttactagatgtgtaattttgagcaatgcctcaatgccctcaccagcaaaatggggatgataataataattacttcatagcattgtcatggagagtgattgtgtacattaagtacttaagaaatatatctggcagagaattatcactccgtaaatgtaagcaaaaatgatataggtgaggcaatttttgaattaaaggaatcacttttttgtaaatttagtgttatgagctgaatatttgtgtcctcccaaaattcatatgtgaagtcctaacctcaaatgtgatggcctctggaggtgaggtcttcggaagacaattactcttagatgaggtcatgaagatagggctctcatgatgagattagttcccttataaaaagaggaagacaaagtacatacactgaggaaaggccatgcaagcacatgtcaagaaggtggccatctgcaagccagaaagagagccctcccgagacaccaaatctgtcagcaccttgatcttggactttccagcccccagaactatgagaaatagagtctgttggttcaagccacgtgagtctatggtattttgttacagcagctcaaactggtgatgacattgagtaaactacatttgtgtataatctgagaagatttttccaggaggattataaatatagaagaacatagttgtcaagaattaagatcttcattctgagcagaatctaaactcttttcatgcaagaaatttttatcctcaggtcctgtccagtttcttacaattgatctgatatttgaagatggatgtgataactgtgcccctgctgaggagaaacctagaatctctaaaaagtaaagtagtggaatctggcatcagatggtcccaggtcctgtcccaactctactaactgcttgcacagagcccctcaaggcatcacttaacccctctgagcctcaattattcatctatcgaaaggagataaggacaaaaccatatccagataaatttcaatgagctgctgtattagaaaaaacttctgaaactatcatacaaatgttaattggtattattagtgaagaaaccttttccaaaagacctcaagcacagtgctgagcattcttaggatttcaaaaagttactttgaaaatcggcgctcttgtctccatctcaatctccctactcctataacttttggcttctgttaaacatctggtcagacttaaaagagcaagttagaaggggaattagtcattttacacaacgtcttagttaattatctactacagaggtaaataaataagactttgttgtttagttttttgttcgttgttgttttgttattttttttttttagagatggggccttgccacattgtccaggctaaactccaattcctgggctcaaatgatcccgctatctcagactctcaagtagcttgtactataggtgcatgtcactgtgcctggcaggacttgttacttaaataatcaatacatctgaatcttgaccagagatatgcatgcatttttttccagccatgtcttccaggtttccaagcagcatttatctttacctagctgtgctacacgtggttgtgcaggtagcgcactgcacacacaggagggtgacatcacatagcctgatgtcctctagagctttgcaaaacagacctgcctagctctgcacggcagcctgatttggccaaatacttttctctgtcactcagggacctatcttccaagaaatagcccatagatatatagtcttcaccttccagattccctactaattgagatttggaaatgttgtttatcctaaattttgtgtctctcattaccagctaatagacgattagcagggctggtttcatagacaggcatgcagcctgtgcagaaacatcaggccctggacttggtttaatgctttactgtctccatcttgaaattcttttttttttttttttgagatggagtcttgctctgttgcctgcccaggctagaatgcagtggcacgatcttggctcactgcaacctttgcctcccaggttcaagcaattctcctgcctcaacctcctgagtagctgggattacaggtgcatgccaccacgcccagctaatttttgtatttttagtagagacagggtttcaccatgttggtggggctggtctcaaactcctgaccttgtgatccacccacctgggcctcccaaagtgctgggattacaggcgtgagccaccgtgcctggccaaaattcttaataatgttttgaacaaggagcctgcattgtcattttgcactgaaaattatgggccagtcccaatgattaaagtaaataaaattcaaaagctcatcaaattgtatccagatatgagaaggcttataaagaagttgtcagcagggatgcatgtattaagatctgcaataacctgcacaggtggtctacctcagaatcatttggagagtttgtaatgtatgcagattcctgggcccacatgctggagattctgattcagtaggtgtgcaactctggtgggtttatgtgtgtttgtgtgtgtatgtgggtttctttttcttttgtaaatgtcacgtcattccagcgtgcagccatgtcaggaaattattgctttgggacatgctacatcttacgaagaagtggaatcagaaggagtcaatttcagtgtaagcccgtaagttgtccttcacgtgttcactgagattagggtgtctctttgctctgctctgctattgaaattcctttcccaggagcctaagaaaaagacttcaaaccttaaacatgggagaaatggcttttaaaagtcaagcgtcttttaatcagatggtgttaaaaatctaagattaaaaagttaggagctttttgcatttttcccccactcctcctatcactggaggatttttagtgactggagagggtgtttcaaaacacccctgaatggtcacaacttcagaaaagagaatatggggataggaaagtaaaatgagattgtttggtacatgagtatcactctggaaaattccatggatgggaggatgttccaggtgcacattttaagcaataactcagcacagagtcagattgtgcagtgtaacaaaactgtccttagctgcatatttgtcagtctttctggaaggttcccagctcccccaagatggcagctggctctcgtccctgaggtcagaaagaacccctcccccgctgccctaggactcacagatttcttcacaaaagacacaaactctgcatggtcaaagcacatcacacatgttctattttcaagtttctctgttttattgtgtttgattttttttctttttttttcctgaaacaggatctcaccgtgttgcccagactgcagtgcagtggcacaatctcagctcactgcaaccttcacctcccggttcaagcaattctcctgcctcagcctcccgagtagccgggattacatgtgcacgccaccatgcccagctaatttttgtatttttagtagagacagggtttcaccatgttggccaagctggtctcaaactcctgacctcataatcccccacctcgacctcaaaaagtgctgggattacaggtgtgaaccactgcacccatcctatcgtgttttatttttgtttgtttttttgtttctctttttttggtggggcaggaagcagagtggaccgttttctatttgttatcaagataaataaatcaggcaaaccaccactttattctaaagatctgttttgagagagccatagtcagtttccccagtgtaaggaggaaatcattcctatatactagaaaacttttcaaaattttttcaggatacaaaacaaattcattcactcaagtttattcaagggtggctgatgtcaggagaattgtgcacaggagttcactgtgtatcaatctgacactgaaccagtctctaacccatggcaaggactgagaagtggatgaaaccacactaagaggatacccctcaggtcatcctttcacgagtttaactcaaaaataggcagggagccggaaacatgtctgcaaggcattacagaacccatgcatcattacaggggattactgagacgtaggggtggaggagcagggatagagacctctcctcagcccatctaaaccctctcccaccactacagccatcctcttcagcacagatgagcgctcacacctcctacgcctccttccccagagccttacagaaatttccagacccgttgtctattttggagagtgaaacttgcgataggatgaccaaggagtcttcttttggtgtgacttcctccacttctcagcctatgacataggttaactcgagactggttcaatatgaaattgatgcccagtgggctcaaagcttctacttcacaggcttctcatgtacagccaaatgttccttcacctgggaacgttctgaagagtgttgttactatcttaagggaatatgcttttaatttaatggttgccaagagcagcaatcttagaagtgtggtgccagctctcctcagaggctgtcttcaaaggtcaaagggaccctcaggaactgattctccaaagtgctaagggaccacgctaggctcataaatcaaagggaaaaaatacatccaaactcccttctgggaggctacagtctagactgtcttatatgctctttgttatccattaaaataggcagtaaaatgtcaacacataaaacaaaatattcacaaagagaaataaaattcagtagagttacatattctgatagaattttcaaaaccactaggtccatgtagcaactagagaggtggctggagaagggttatttcaaatccaggagagatgttaggcacagagtgaacaggagtaagaaacgggctagaaacaggcaattcgctaatggtctttattcagaaaaacagaatccactgatacttataccctcattgtcctcctgagctaaaggctggagacattgggcctggagtaaaggaaatgtaatcctaggcccctacatgatccaacaataacccattgccacagctatgtaaacaacagctagcaggtttcaactctccacatcaactcctggacagcctcagaagacttgccgatgtctgcagaaccacataaatgttaaagattctggcaacagtgagaagagaggaaggaacaaggaggaagaaagtcagaggtattaagatagagaatgtataaaaagggaaattgtgataaaaatgtatggaaggaaaaaatggcttactaccttattatttaaagttacaatgatgatcaacagaaattttaaaaaaatacaaaaaacaacaaaaggagggaaaggaggtgatcagagggtatcacagtagtgtgagttaaacctttgtcataatgggaagtcaataaatgggacttaattttttttaatcaagtaattttttgagttgtggagttaagacatagaacgaccaaaaaaaaaaaaaatcaaaggagttttctccaggaagtggaactgatgtcagagaagggctggggggagacaatagctttttataaaatctccagtatcacatcatggtttccgtgcatactgacaaggtatagaaactcagacctggccgggcatgatggctcacgcatgtaatcctagcactttgggaggccaaggtgggtggatcacgaggtcaggagttcaagaccagcctggccaacatggtgaaaccccatctctactaaaaatacaaaaattagccaggtgtggtggcgtgcgcctataatcacggcaactcaggaggctgaggcaggaaacctgcttgaacctgagaggcagaggttacagtgagcctagatcgcaccactgcactgcagcctgggcgacagagcaagactccgtctcaggaaaaaaaaaaaaaaaagaaatactgagaccttaccacctatgtgattttaggcaactttaacttttccatgcacagtgtcctcatttataaaatgggaccagtaataatgcttacttcatacagttggaagaatgacattggatgatacaactacagcacttagtgcaatgcctgaccaacagtaggttctcaatgaaggttggctataaataatatttgtttattattattattattatcaccggagagttgcttttattcacttaatacatcacgaacagctccacaaatatagatctatgggtcattcttgaacagctgcattaaagtccgtagagtggactggcataattattcagccttcggactaaggttcaaacaagcttcttatctaaatctcatggtttctcaacctcagctctacttacattttgggtcaaattattatttgttgtggagggttgtcctgtgggtcatagggtgtttggcagcatccctgaccttgacccacagggtgtaccaccacccccaagttctagcaaccagaattgtctgcagacattgccaaatgtcccctggaagggagggggagatagaactgccccaacatgagaacatgcctcaaatccatcctaaaaacttcagggactgttcacctgcagccgggtttcttctcatgagaaaactttctgaagctagttacaggcagacataaaatactacagtccccatttcatgtcactcacctgaaagcaagggtcagagacacagctttgctgtgccctcagtttaagatacactttacaagagtttggagaagaaacaagagatatgattcaaggtagtaataacactaacccctccaatcaaataaactagttgaggctgggcgcagtggctcatgcctgtaatcccaaacttggggaggccgagcaggctgatcacacttgaagttaggacttcaagaccagcctggccaacatggtgaaacctcatctctactaaaaatacaaaaaaaatcagccaggcatggtggtaggctcctgtaatcccagctacttgggaggctgaggcaggagaaccactggaacataggaggcagaggctgcagtgagctgagatcacgccactacactccagcctgggtgacagagtgagattccatctcaaaaataaatgaaaataaactgatggaaaaaaatactgagctgatatcattcatgctcttgccttttgcaatctcagtttatcataatcttattaaatgagattaacagatacagtttcagtagggccagaaataatgtttgttcttccacaaatttcttcctaaccaaggccaacagccttgccattatgtgtcaaatgactcagaagaaacagactccacgaggcccagccccataactaggtgaggacaaagctcaaaatccacatctaaataacactagctcagaggtgatcttcatatacaggaggaggggacagctaataaatgcaagtataatctcctaattataaatagcattttaacttagagttctgtttagcaaaattatttccatatccttggggatggcttataataatggtgctttgccaatgtggtttcagaaaattctattaaatgaaaaatcctgtagaacagatgtgttcacaagtccctgtccacacagcagccaaactgcttaatgaaaacaccgctatggttcagaattgtgctttctactgttataggattgttatattagcatctcagaagagtaaagaaggttggaaaggaatgagagagaggaaattaccagaactaggggtcagggatggaatatctccaaggcaagtacctcaacatgatacagaataaaaggaagatgataaaagaagtgctgttttttaaaaaatagcaaaaccaggacatagaaatgaaatgcctgatttaaactaaatcaagtaaataacaccacctctgtgctctgtatatattgaaaatgcatacatttccaattacatataattggaatgtaacaaagctatttccaactccctcaaattcattaaaatgagattttttgcctgtcttcaagagctgtttcttactcaaatcatcctcataccaggttactccaaggaccacttagtttgttctcaaaagttatacatgaaattctatgtgattcttccacaaccatttgcagtgactgtttggtcatctttggaataactgataaatgttcatattttgtctccaaagcaagcaagaacaaccccatttgagggtttgcagcaaagacgctcctcgatggcatttctcttttgctgtgtgtgtgtgtttacatctaacacagcatgaccttgcccccaaagagctttacttccaagtaacacacagcccaaaactctcactgctgtggtttgaatgtttgtcccctccaacactcaagttgaaacttaatcctcaatgtaacagacttaacaagtgggccctttaaaaggtgacacggtcatgagggctttgccttcatgaatggatgactacgcttatggattaatggattaattgattaatggattattatcaagggacgaggtttgctatcataaaagtgggtctgttataaaaaccagttaggccatcactcatgtgcctccttgccatcaattcccggcaccacctcaggattctatagagagtccccaacagcaagaaagtcctcacaagatgttgcccctagactttggacttcccagcctccagaactgtaagaaataaaattatttatttataaattatcaagtctcaggtattcagtgataataacagaaaacagactaagacacatgtctaccccatgtatctgtttttttttttttttttttgagatggagtctcactctgtcacccaggctggagtacaatgatgcgatcttggctcactgcaacctccacctcccaggttcaagtgattctcctgtctcagcctccagagtagctgggattacaggcacacgccgccaagcctggctaattttttgtattttagtagagacggggttttaccgtgttatacaggctggtctcaaactcttgagctcaggcaatccacccgcctcagcctcccaaagtgctaagattacaggcgtgagccaccatacccagcctactccatccatcttgaaactgcaaataaggacaattttatcccattaaaaataaggtaattttaaagaaagccaataatttaatttcagagaataacagagtagactagtaaaaataaaggttaaccttgaaaataataatattggcaattttaaaggccacgaagctgaaggataaaatttcaatttatttttgaagttaaacctggctaaggactaccaaaagtattgagatttttatcaaatagcatgcctctcctcctagagatatcaccacacacatttttcacttgaacagatgagtttttatcttaaaaaataaaagtttagatcaaagctgggaaaatgcttctcattagaaagaatgtaaaacaaatattttaataaaatctatcccctaagacatttctgaggtgatgctgacactgcatgcctcagtttaaattaaaactaatatacccaatttcacagatctctgaaaccatctttgatagcagttacgctattagttgctttccagctcttgctgaaaatataaatagtgaacgtcttatctgaatttgctgatgcaggcagtaatagaattcttttacatttaaacagagaggtacagctagatttgtcttttccactggctttattaaaagagattaatatacgtatcgtcctttcacaatttccaatgcacatacattatctcatgtaatctttccaaccagtctgtgagtttggtaatattatcatcatttttagtgaagtaattagatgctggagaaggaatggatttttgccaaatattaatcaactcaaaagaggtacggatagaattcagtaaaaccacccagcttttatagagtatatcttgtcttcctcacataaatgaatgagttacccccccaccaacaagtatacactcatacgcaaaagacacagcttgtttcaaaaacttgaaacaattggtgatttatttgagaaattcttcagacttgaaatctttgataaccaattttctccttatggcctgtagtctttgtttgattacttagtgacttccaagttaaactgaaagtgaaacactctactgcttgggggcctgctgggttctccaaggacagccataatgacatcatcccccagtgaaccccacttcaatagcatttttaatttttcattcaaataatacacacacaaagtcctaaagtctttcctaactccagtgtcaattaatcaagcaaataaaactcctttcattttcatttttgaaatgttttagaagacttcctgtgattttcaatttgcttgctaaaattaggttattcaagaattttctaaaaatatgtattgacttgaaaaaaacgttgtttagcattttcccatccctctcacttccaatactatttcacagacagatttctcaatgaaaacagcctactaaattacttagaccttgtgaagaatatacaaacagaaagacacacagcgggcttcatcaggtgtgtgactaaattaagttggaaactagcatgacagttgtgtgtgcacgcgctggaactaggctgcccgagttctcatctcagccttactatttttactaacactaagaatttggggcacattatttagagtttctgtgcttcagtttccttatctgtaaaatgggcatggtaatcatggttcttttacctcattggtttactgtgagaattaagggagtcagtcaaggtaaaggtactttgaaaagtagcaggcacaaagaaagtgctatagaaatacaatattgactgctatcattatagcaatgcaaacaatctccctcttgatcattcaaagaaaaaaaaattaaagcattttcatgttaaacacacactcattttttccctgccttctttctaagattttaggtcagggcttagcaaactgctgccagtaggccaaatccagcccactatctttttgtacaacaagcgatctaagagtggcttttacatttttaaatgattgagaagaaaaaactaaaagaagaagaatatggcatatctgaaaattatatgaaatgtaagattccataataaaagataactggaaacccaacaagcttattcgtttacatggtgtctgaggctgcttttgtgctacgaggcagactgagtagttgtgagacctcatggctcacaaagctgaaaacatttactatccggcccttacaggaaaagtggccagctcattattttcttggtgattggtgtgagcattgcaaactttagaatgtttctaaactttagaaatattcactttctgtgaatgaagggaggtgcagatgaatcctaaaaggaaaaattcagattcaggaaaatcacaagataaaactcaagtacttaggattgttccttctgaagcgttctaggaaaggtatggtgatgaagtccattaaaagtatatgctaaactaaattgtatatatactatgagatttgattattcataataactaaaaatattccacattcacagcatagatgctcagttttatgatgaaacttttgtacagcagctgaaaatgtatagggcttcattccaatcccctgcacagccagctttaccactttcttttctttcattttttaatgcattgcatattaaagtcaaattttgacctgaaaaatcaaacattagctatgagataagtttacctagcctgcccactttctcatttgtctctgggattcttctaattttttctgggtagaatcagttctttcttttctcaatagccataatctcatacttagtcttctcccacagttattttatggcactttattatggaaatattcatatttagaatttttttcattgtcatggccttcctactattgtcttcaactttcctcatcaccgatgaaatcttttcttatactttggtgaggccaagttgaagaagaataaaatggaaagttctgttcatgtctgtagtttttttcttgcttaagcaatttcattttttattattttaatagaattacttttcctaataatatgatttcccttataagttcatgcaacaacaacagctctggggatattacagttaatgagcactaggattcaggagtcctgtggaaagtcaccaaaagtccatcagctccttttctttgtctgtgaaatgaaaacatccaaagagatggctctgcatttctatgtaactctgagtttctaagattcttgctttattcacaattcttgtagttattgggtctttccatagataatagtttctaacattggatcaaaccatttatttctaattctccacaactctgtattctatacaatagttctaaattctagattattacatcactttctaattctctcctttactatgagcttatgattcagattcatccagctgtgtttgcagctctatttagcaggactagcggttgaatgtgagcccctagggaggtgagccccaggcatatgcaaacccattagggcagctaaaaacaccacttcccttgcaggaagagtgggagttattgaaagcccaggacttttcttgtccagtgtatacaagggaaagtagagtaacaacatttaaaattacaaaagtaatacaaaaatcatgctctttttaaaaattcaaattttgaagaattagatataagagacaaaattacccacttcatcctcttaaaataagaccactcccttaggcaaccagagtatccttccagaactttctttatgcattcatgtgaataaatacagatttataggtacagatatagatttaggtatctttttactcttacaaacattaatttatactacacatattattctgaaactctgaaacttgcaactttttaacttaatgctacatcttggagttcctttcgtttcaggacatatagatctaattgattctttttattggtttcatagaatccttatattaccaatttctagtgatggatatataagttatttctaatttatttaatctgacaaataaataatgttatatgtttttctttgtgcatatatgtaaatgttctgtgagacagaaaacctaggttaaaggaaattagtattttaaattcaggtgaaaactgccaaatcccttcaagcattatttgctactttacattcccatcaataacatgtaacaaatgttcacttttccacaccatctctaccataaatattatttttgttagcccaatgaatgaaaaatgctcattttttgttattttaatttgcattttttggttaagttagcttactaatttttcacattcccatggactgtgaatagatttttccttatcattgtccatttttctattgggtaatttgttttattgactagagaatgccttatatattatagaaattaatcttttgtttattatttatattgtttgtctcattatactacctatattttaactttgcttatgggcaagtttaaaattttaaactgtatatctttatggtatctgcgttctgtgtcttaattaggaaaatcttccccactcaaaggttattaaaatgtcctgcatgttcttcttatatttatagggtgtttttttcagtttatgtctttaaaccatatggaatttatttttgtatatggcataaggtatagaataattttttcaaacgttatcgtccatgcatcatgtatgaaacagtccatttataaatgtttaattacaaaagacacatgattctgtggattctcaattctatcccattatttttctatttccgtgccaaaaccacaaaaaaccacactgctgtggaaagttccctctcttttctttctttccttttttttgtgagacggagtctcgctctgtcgcccaggttggagtgcagtggcacaatcgtggctcactgccaagctccgcctcccgggttcacgccattctcctgcctcagcttcctgagtagctgggactacaggcgcccgccaccatgcccagctaattttttgtatttttggtagagatggggtttcaccgtgttagccaggatgatctcgatctcctgacctcgtgatccgcccgcctcagcctcccaaagtgctgggattacaggcatgagccaccgtgcccaacccaaagcatatttttacttgaagaaaaatctaaaaaaaaaaaatttattggaattacattgaatttataaattaacttgggaagaaattaccagtttacacttctgccttcccatccagaaatactgtgtattattcatcatttcttttatgtttttcaatagagtgttctaattttccttgtatgtttcttaggctctgaggtttatccttaggcatttcagtgtttctgaggttctgcacttattcttaggcattttggtatttttattattatgaataacatctatttttatgagctactcttagacatcagtaaatttgtgatctcagtgtttggtcttacattcaggcaaatcaatgaattatcatattagttctaaaagctttttggtttgtctttgattttctaggtagaaaatcataccaactacaaatgattgtggttttatcacttccatttcaatgtttgtacactatttccctcttgtcatgtttcattggctggtatctgcagtacaatcaggagtaataatagagctcttgattttaattaatgtgctccccgtgtttcactattacatgtttgctcttttggcagataccttttatctaaatttaagaggctatttcttcctagttttaccaggaatatctgttgaatttttataaattgctttttctgtacctggcaagataatcatgtaatttttctctttttctttaataaactgaaaaatgctaatatatttcatagtatagaaacatgctttcatttctgaaataactgttcagtcctgatgtgttattccttttgatcatcactaggtttcattggcaaatattttccttcgaatttttaaatttatttctgtaaataaagttagcctgtgattttcttttgttaggctgaatttgttcagtttggaaatcaaaattaaaatcatcaaagaataaacaaacaagcaaaaaatatttgtgaaaaatttacagaggactctggtttaaagtttctgttcctgtaggagtctaatcctgtaacactgacaagaaaactataggaaactgagattttatatacctgtaatttgctgttgcaaattataggtgtaacccagatattaaacaggtgatactggcaaggaacaatcagaaaccaactttattattttctccccctgctagtcaaggccattttgtgttgctgattctctttacctgtggatgaaatcttgtcttgctcctggtaaaatcttgtatgaacccccataggacatcccttcactctatggttactaactgctctctattcacttgcactcctaagggtagtttcatttcagtaattaaatctaacatcttgtgtaacagtcaaactccaaactttatttcaaagtgagaggaggaagggcctctgccctgaatacctcaccctccaagctgtggcttctaactcctctaggaccagagccaaagaggagagaagaggtaaggagacaggaaagaactcacttgaagggcatctctgtgatctagctttggttcttgctggtgtttaatgacaatgctgctgtgggatgctttctgtcttctttggacaacatctccaagctggggatccctcacctctagttctcttgatgagtataaacgtatcttcttgcttatagcttagaattcctccttcagtcctggcatctagtggcacacctccaaccccactctgttgatattttcttgctcctcctggaagccctgctggcaggatctaaaacaactccaagctgctgccctgacatgtggccttcatctggcccccaggtgacagaaatgtctgactcaccatcagacggaggacaccagacccaaacacagccctgtcctcagctgccacagctggtccagccagcctctcacctgtgaaggtttttttgtaggcatatgttatgcaccgcagggttcacagctccagctgtgcaaataaacctcttcaagccacctctcttaccttgaaaaaagtgaatcatttttaggttagggggtgaggagtgtgcaagagaggtctggagcttgggtgaaaaatgaaactcaaagcccaagttttcccaaaccaatcctctctccaaactccaggttcttctctcagactccccaacctcttttatggccttgtgtaggaggtcagctaagggccacgaaacaggattttggcccctcctttgcaagttccagggactctggagtcccagtcttccactttggaatgtgggagtcgttgaggcatcatcttggaactatcaaccaaaaatgagataggaaagagtattcgggagaggtagactatttatcccacacatttaaatttacctttgaattatttaccttcagatgaatatccaaaagaaaactggttttctcactcacagtgtctctagtccctcaacacttaaaatcttcactctgggaaataaattatacaataacttaagtgtgttcttaagccaagccaacagaccaaacatctttgatgtgtggctaaaagctgggccatgatgaatccgaatttcatttttcttttcagtctatgggcttcactccttgactttgatccacccttcataaagctataggcaaacgtatcaccgattttgttcttatacactacacatacattcacacaccctcacattcgtcttgtactagagatggcaacctataaaagatgacacagcagtgactcaagagtttgagcagctacctcacccctttatatacgccttcatccaaaattctccctgggaagcctccttgaggttcaaggccactaggcaagcaggcatctgtctccctggaaatgctagcagatcatcaccccaggagaatcccaactgagaggagaaaggaaaataaataaaataattgttttaatgaataaacaaatatggaatatagtccagggccctgggtatctgcatgagcatgggacagagaaactaacaattgtgaatcaggagaagccaggtcacaagaagcagtcatttccctctaggccaccaccccagcatctctaaatgtaggaatgtgagcaaagtaattcctaaaattctaggattctaattagtgttgaggtgattatgtttcttttcttttcttttctttctttttttagacaaagtcttgctctgtagcccaggctggagtgcagtggtgtgatctcagctcactgcaacctctgcctcccaggttcaagcaattctcctgcctcagcctccagagtagttgggattacaggcaggcaccactgcacccggctaatttttcgtattttcagtagagatgaggtttcaccatgttggccacgctggtcttgaactcctgacctcaggtaatccacccgcctcggcctcccaaagtgctaggattacaggtgtgagccactgtgcccggccaattatgttccttttacactgattttcttggagcatcagttctaactaggattcctcagggtacagataagaaacattccataatgattctctacaatagggatagacaaactaagggaccctcatgcaagccaggctgccacctgtttttgtaccactttgagctaagaataatttttaaatggttggaaaagatcaaaagaaaaaataatattttataacctatgaaaattatatgaaattcaaaattgagcttctataaatacagttttattggaacccagccatgctcctttgtttgtgtctccctggctactttcacactacaatggcagagtagagtaattgcaattgagtgtgcatacggcacacaaggcctagaatatttactctgtggccctttaaggaaaactgctccacaatcaggaagaaggtcatggaaaaggaggtgacatcagtgggaagaggcagtctggctccaattcactccctagaacaatggtggatgtctcccaagtagcactggtatttctgccttctactaaaaaagaaaaaattttttttgagacggagtctcactctgttgccccaggctggagtgcactggtgcagtcttggctcactgcaacctctgcctcccaggttcaagcgattctcctgcctcagcctcctgagtagctgggattacaggcgtatgccaccatgcctggctaatttttgtatttttagtacagacaaggtttcaccatattggtcaggctggtctcaaactgctgaactcgtgattcacccgcctcggcctcccaaagtgctgggattacaggcgtgagccaccacgcctggcctaaaaaatttaaaaatccaaaaccactgaggcccagaacaggtatcttttgggattctagaagagtaaaatggggtgggaggggaagtagaaagggaaaaaaaaaaaaaaaaaaaaagaccatgggagtcaagtcagtgatttctcacatacaaatgatctaaaaagtttctgggctcctggtaaagccaaatgatctgggctgcattccaggtccaagatgtcctgatttcctatttttgttccctttcaggtctcagatttcaaaactttactgttaccctatttagggtcactatgaaaatagcttagaagtcagccttagaatttcaattcagagatatcagagacttttgtactagggacctaaaacctttaaaagatgtttgttttattgcctccaaatgcctactttcaaagttttgccaggaacacgtaagccaacaaggagcttatatctgtgggttgactaaaatcccgtaaaagctattagagtataagcttccaatgaaactgtaagtttccccaattaaatcgataataccttgagtggaaagcatgccagctccagctcccctcaaactgcctagcacctagtaagatgccattgtaaatacttgctgaataaacgttctatatattcagagtttgcttgttgttacatattgcaactgtgtgttaattattgacataattctgggtatttaatacattttgtgttaattattgacataattctgcgtatttaatacatgttaatgtgatcatattaacttacataagcatttgcatgcacacatcactatgccatacataaggaattctacatacacaaatgaaagatagcagatacactgtctgcccctacagaccaatccagagatttgtgtcacatggaccaagatgatattcattcacaaaatgagaatctgctatatgaaatgagcactgtgaaaacatttcccaaatgccaagtaaacataacccctcctgtaaatatacacgaagaagaaagcaaattcctacgaaagcaacagacacaacttttgactgctgaatctgggtgaacatttgggagtgagacaaaccaaacaatccatttcctaagtaatagcaaaagcattctttggataacctccattagaagttattgttttccctcataaagctaagaatacttaatagaatttctctcattacagcatgaattcacaagtaattacatcaggaatacgtaaaagaggtattagcagaaccagtcaaaacaagaatctggagcaagttggtaccatcagcacttacacagaatgcacaattagccattaagagcataaagcattagaataatagaaacacagtggctaaagctgtgagtatttcagacacttgacttggaatatatccagtagctgacacaaagtctcattctcaagttcaaagaaaactttcttctattattaaaaagaggtactaggcaaaatagtttctactaacctttgtagtcaatgtcctgggccccagaacaggagtgctgtgcagggttcttgattccctgtaaaggaaaccaactctggttacttgaaggcaaaatgcaatttatcaggaggatatagggtagatgacaggattcaggcaaagactagtcaaccaagcacagaaaagtggacaaaataaaagaaggccagaaccacagccaaaatcctaatagaagatcctacatagattcttactgtggcctcattattactagcaccactgccaaccctggacagggaattctagaatgccccctgcttctttgccccatggcccgagtcaaaatccaaggtaggaatacgccaggcttaccttattcaaatgtccattgccttgctgcaatgggagcagagcagctggaaactcaggcctccttaatgggaaccagggtcctgctgccacccatcttgagctttcccaaaatagggatggtcttcagagtctcaactaatgtcctttttggatttgactcctctttctcaaggaactgcaaaataaacacagctatcactattacacaaaaaaggaaataaactacaatactagatgaagtataagtctagggactatatacctactatatatgttctacagtaagtcttatggagaaataacacttcacttctgtatgcttttctagtccttctagaattgaaaccagtgaggggcaatttaaggtcaacatctgctcctcacatgccttccacagcaatatgatgtgagcactgcagttccattgagctgtggcaattggggtagtttaggaagacagtggagaacagcaagacagttagatcccagtgaaaggaggaagtgcccatgtttatcccaacaatgaagtgcatgttgagaagtgttgggaaccttcagcttcaactccacagcaacagagaagagacttaggactgaaggatccctaaccaacaatgagatagctgcagacatgcatagcagcagtattttctgttcagcttgtaaacacccaaatgtggaaagctaatcaatagcacagctatgtgatgtcaacacactgacttttgccttgggctggaagtccctggttcagtcaacccactcccatgagagacactcacagccccagagtttatcaaaatctaaagccatccagttcttaattacttctctttcataattaaaaagaaactcagactacatttctaaatttctttggacaaagaatgttttgttaactcaagtgctcagttgggttataaatcctcaaagctaatgccaatagatctacaacaagaagagtgatttttgtctgcaatttttttaatggcccccattttagaaaagacaaacatttatctactcaatgcacaatgcagtgtggtaagtacctccgctgtcttatgaaagaacactcaaactatttgtacgttttgggtagatttatttcctagtgattgcaactggatacatttttcaggtcaaagggaaggacacagtccttgctgcagagaaaagccataagtacccaatcctcacagcaggagttggtgacctgatactgaagggctgaatccagcccaggatcagggcaagttctgcctgctttgccccagtctcctgtcctcgggttgcagacacataagaggctggtatgctggaccgaaggactgaagcagaatgagaccacatgcattcaacccagcagggggagcggggctgggcatcccaccccagaagccaagcctaccaggcaacctttctaaggcttggcaaaggcatgctataattagacattaacatctaataaataataagtgaatgccactgtaaagcactttgcaaatggagaggacactataagtatgtccctgtcatcaataatcatggtgttctaggtaatcacagcattcaggaagcagtttagacacaggcagcctcagcagggataccactaatgtccaaaggcctaagcatacaatttttcaaatacctgccctggctggaaggctgcccagtaaagatgacaagcccacagagctcaggaggtcattcctgagagctccacagaagatgtaaacactgccagggaaaatcattccgtttccttaaagaatatttggagcagcaagctcacttgtagatttactaaagtggaaatctacgctagaagcagcagagcccctagaagcagcagaaactgagaaaatatttaaataatacaaaaaagtcagccaccctcactagccaccttcataatcccaattaacatcaataagatttcaaggagaatgtcagatgttagatgctgtccattgaacaattttaagaggaattctaattcttttatagtctagttttatgtgtgtgtggattatttacctgggagtaattgtagctttttgcagagacttggatttttattttatattttattactttctagttgtacaaaaattttcattgcagcatttgtccaaaatctgcagccctcactcatttctccatttttggatgtctacactgctgaaagtgggcactacacagattgtatatcgtctaatcatattctcctttttgagacagagtcttgctctgttgcccaggctggagtgcaatggcgtgatctcggctcactgcaacctcctctgcctcccaggttcaagggattctcctgcctcagcctcctaaatagctgggattacaggcacctgccaccatgcccagctaatttttgtattttcagtagagacagggtttcaccatgttggccaggctggtctcgaacttctgacctcaggtgatccacccacctgagattacaggcgagagccaccgcgcccggccaatattctccatttttgatgtgtacttaaatctgtctcttcatctccacgctaaaaccctagagaccatggacagtgttttagggtatatctttggatttcctctgggactaacatgataatgcgatttagtaaattttttgcacaaattgctctactataagatcctctaactggacatttccaatcttaatattctgaaaacttcatgcaatttttttggaaataatttaggcagaagtgaagttcacctttgcttgcaagttcctacttcataggccggttgatcatttaaacaaaatcatttaaacaacatctcagggaagaacacttagtacttaaggacaaagcaggtatgctcaagaccttccgagatccccatttactttagagttgacaagctcacccacagctcatttaaaggaaaggaaaaacggtgagcagttttcctaacaaggtatttctaacactttcaggcctcctcttttgagagcttttttaaaaaaatatactattgaattttccatttatctacaaaaccattaaacagtcagtgcccccaagcaaacaacagagacatttaaaagaaaaacccaagaaatcactcctcatcccactccacccttccaagataaccaatatcagcattttgaagtatgttttcatgtttttcttgtggaaacataccaaaacatgtatatttacatacagcttttggttggtcggttggttgttttggggggttttgcttgtttgtttgggttttttctttttggcaaaactgagatcatattatacatattatattgcaacttgcttgttttttactcaccaatgcataaagaacacttttccaggtcaccttatcaatcattctccttcttttcaatacttacattatattcctttgtgcatgtatactatttttttcaacttttcctatcattgaacaatcgggagttttccactgtacaactcacttcatttgtctaccttagtttgtactctaagcttttctctaactctaaaattttgaattcacctaaaataaaattcagttctttggagaaataaaagctattttcttggtcaaattagtaaatatttattaaatcaaatttcttaaaactaatttggatctgacctttagaacattctgatattcttcaggacatcagcacgttctagaatagtacttttataacagagaatgttcacacctccataattcatttaaaataagtaaaatatgctgctgaaaattctggcacaatttgtattactgtaacacagattcagttgtgtatgtgtgtgtgtgtgtgtgtgtgtgtatatatatataaaatgtgtgtgtgtatatatatgtgtatatatatgtgtgtgtgtatatatatgtgtgtatatatatatatacacacacacacacacacacacaaacattttctacatggtgttctggggaacactgtctagggaaacgctaatagtgatcaagtaagtttaggccaatcagttttaaattaaatatatgatttttaaattctgattttcttgcgaaggtgatcacttctaatctctttccctagctttcctcttaagcaacagagatatatctgtacatctttattgaacatctgtatatctttacatccctactgtatatctatacatccgtatgtctctactgtacatccatacatctatacatctctattgtacgtctatacatctgtctctactgtacatctatacatctgcatgtctctactatatgtctgtacagctatacatgctacatctatatatctgtacatctctactgtatgtctatacatctatacatctatactgtacatctacacatctgcccattgttactgtacatctgtacatctctacttgtctgtacatctatacatctatacatctgtacatctctactgaacatctgtacatctgtatagctctattgaacatctatacatctgcccatctttactgtacatctgtacatctctgctgtgtgtctgtacatctatacatctctactatacatctatacatctgtacatccctactgaacatctgtatatctgtatatctctactgtatgtctatacatctgtatatgtctatggcacatctatacatccgtatgtctccattgtatgtctgtacatctgtacatctctactataaatctatatatctgtacatgtctactgtacatctgtacacctgcacatctctactgtatatctatacatctgcacatctctatcgttaagtctgtacaactgcatgtctctactgtacatctgtacatctacacatctctaccatatgtatgtacttctatacatctttactgtacatctatacacctgcacatctatatatctgtatgtctcaactgtactgaccagatacagaggacctcatactgcaaggtccctagtaccaggcacacagagccaccaggcaaatatatgtagccctctagcatccctgcccaccccttctcagcacacctctttattctgcatacattgtcccttgctgaaacattaagcaatcagtccagatggaagtaaaaaatcatcctcctcattttttctatgccctcaatcttttttattcttaaggctaaaataaagtgacatttggtttcactttttaaaagtttgtcactcataagaaaccacctgaaagtatgtaggaaagtggcttagttttaacccagcaatcagaatgccacttaaccacaggcatatggatattcaattctcacctccagcaaaagagaaaaatgaggcttggccttaacgcgtccacatcagggaaactggaagctcgtcttgggaattcaaacagcctgaggccttttcacaaagcccaatcaagccctcccacccccactcacaattcgactcttactttcacagtgcatcaaaatagacaggaattactttttcaaactgggtaaaatccagaagatttgtcttgggtatctactccttgggaaaaaccgtgctagagactgagaatcaaaagaaactctttctaataaacttaaagctttaattgaagcaataaatcaaatgcacagagatgagcagcgcaggatgctagggggtaagagcctaacggcttaccactgttctcccaaacgagagtgcttgcacctggctgaacaagacttctggggcagggctgagaaccacagataagaaccacctgggattgataaagggcctgcccagcacacgcctacctcatcagactatgaggatgagtgccctggaatctaagctttgaatcagctctccaggggattccaatagacactaaaatcttaaagtcataggactacattttttcttgaaatgtggttaccagaccagcaacacctgaatcttatcagtaatgagaatgcgtccctacgctacagacctactgcatcaaaaattctggcaatggactcagtgatcgctgtttaacgagccctccaggtggttttgatgaaatgctgaaagtttgagaaccgtggctatcgtatgtctctgcagacctcagtttgaaaaatattgcagtagccaataagaacacaggagtttaatgagggaggccattgcctgaagcaggaacagcctgtagacccttaaaagagaagagctcatctagaggatgtggcattgaaataatggattacacagtggaaaagaagaaggaaaatgaaagaaaatgacaattggcagatctacgcatcaataatcacttcagtgagcagagaagtttcatgccatttttgaattataggatttacagttaggcatgctaagcttgatctgggagaacgtaagagttacaggaaagtgtggactttcttattcaggcattgaggaaaccttaaaggataatgagttagggaatatcaagacacaagattatgtttaggagatgtgattatgcattaatgcacttagagaaatgtaaaggagggttgaaaagtaggaaattagattaaaagtcttgcagtatttcagaaataaggttatgcgggtctgcattagggtgctggctgtaagaggcaaagttaaatagatacagaggtgaaaggaagaaaaatgggctgtacttggagtttggatggggtaggggagagtgaaggaggaaccgaaaaaggaagggagatgagaaggaggaaagtggataaaaatgacagcccagcttcaaggctgatcaataaggagcatttatgaacacaggaaatcctgaaggggtatgagcttggggcagggagtggggaacgggggtgggggagatttggagcctcatcatttctcacaattatctctactctttttatcacgttcagttctcaaatcattctactgcaaaggcgatgaagataataattctacaagctctgtggcaactggataccaaggcccttctggcttacaaagagagaaagtctaaatttacccaagaaatgttgtttatccgtattacatctggagagcaacttcaatcttaatcctcaaaatcttccaggaaattccccagggaacctagaatgctggctctcatttacagtagctaaagacaccttggttaacttggatgtacatttaacctaaagtatctgtaatttcaaatttgccaacaaaaaacattaactctgcctttgcatgaaaacatatcagttaaggaggcccaatttgaagcagtctgaatgcacatttttgcttctgcctcctcattaatggtatgcaagtgtgttgctaaaacatgtaaacatttcagggcgtagaaaaacctccttgatgccagcattcctgcttaattcttccctctcctggcaaaccttctggaatgtagtagttaaactcccaggtgtgctgatgggtaacagaatgattaaagaataataaaacactaaaggtcactttctggttcaggatttggagatgacctagctccatgcaaactgagtcagaggctctggacttgactcagaggtggtgcttgcatagggcggattaaaatgctctacaaagcagaagccagaaacacacaccaggatgggagacagggatgcctgttaacaaccactgctgccaactgaaagggctcccaatgaccaaagctggaagaagttaagcaataaaataaataacattatatgagattataatgcaaaatataaaataagcattcataaactcatactcattatattactttcctaaggctgccataacaaattaacacacagtctgtgacttagacaatagaaatttgttttctcacaattctcaaggataaaaatctgaaattaagctgttggctgggctacactccctctgagactctaggaggagaatccattctttgtctcctccagcttctggtggctccagatgtccctggtcttgtgtctgcataactccaacctctgcctccatctccacacggccttctcctgggtgaacctcctcttctgtgtcttataaggatgcttggcattggatttaggacccacctagataatccagtataatcttgttttgaaattcttaacttagtcacaactgcgatgacttctttgcaaataaggtcacattcacaagttgcagggattaggtagtgggcatatctttttgggagccaccgttcaaaccactatgctgatataaatgaatgattgattgaataaatggctgagtaaacaggcaaataaatagagaggatagacaactctcccacgcaaaagaattttaaataatttatggagctactccccactcaagaatgtggaacaaaattctctactccttaaacatgggctgtacatagtgacttccttccaaagagtacagtgtgagagggggtggggagagagtaactctacagtggagaaagctaacgaacactacccaggccaggtgatcaatgttatgtcaacagcaaagagtcatgttaatagcatgatgtgaagagaatggcatttgtttctgttgtcttccttcaaaaaaaaaaaaaacaacaacataaccccctcccaacgctgaaaaaagcatcagaaaaaagcttcattgaaaaaaaaaatctgcaaaatacatgactagtactcctcaaagcttctcaaggccaccaaaaccaaagtctgaaaaaatgtcacagtctaaatgagcctaatgagatgggacaacaaagcgaaatgcaggatcctggacaagaaaaaaggaggttcagtaaaaatttaggaagtgaaagaagggtggactttagttaatatcaatgtatcgatgttggtttattagctgtgacaggtgaaccacagtaatgtgagataaggatagccaggccttgggtctatgagaacaccctgaactacctatctttgcagcttttctttaaatctaaaactgagccaggcacggtggctccacctgtaaacccaacacttagggaggccgaggcaggtgaatcacctgaggtcaggagttcgagaccagcctggccaacatggcaaaatcccatctctactggaaatacaaaaaattagccgggcgtggtggcatgtacctgtaattccagctactcggaaggctgagacaggagaatcgcttgaacccgggaagcggaggttgcagtgagcagagatcccacctttgcaccccagactgggcaacaagagtaagacaccatctcaaaaaaaaaaaaaaaaaactaaaactattctaaaataaaaatgtatttttaagatctgaatattgctgcattcctttgataaagggatgggggcctaatccaggggttctcagcctcagcactactgacttttgttggaggaagttttttgtacattgtaggatgttaagcagcatccctggccttcattcactagatgctagaagcacacctcccttcccagtttgtgtacacccagatacagctcctgacattggcaaggagtgaggcaaaatcattcctggtccaggaccactgaccctgtccaaggcagagaggccagatgtcatgagaaaaacaaacttatccaaatccaagtgctggctatgccacttacctgctgtgtgacctcaggcaactgacttctctaagctctgatttttcatccttttttattttatcgtattttattttattttattttattttagacagagtctcgctctatcacccaggctggagtgcagtggcgtgatcttggctcactgcaacctccacctcctgggttcaagcaatcctcctgcctcagcctcccgagtagctgagactacaggccggtgccaccacacgcagccaatttttgaatttttcacagagatggggttttgccgtcttggccaggctggtctcaaactcctgacctcaggcaatctgcccacctcagcctcccaaagtcctgggattacaagcatgagccaccacaccaggcccaatttctcatctttaaatgagaataatgaatctctacttcctaggtaattgtgaggataaaaacatgtgaagattttagcacaagtgcctgaatatagtaaattaaatataagatacaagttgtggttattttgataacaattcataatccttcgctctgagaaggattagtaatgtcttctgagcagacatgaggaggctttaattaacacccaggccctcaaatcctttaacagtagatgtagctcaggaaggccatgcaacgcctgttgatggcttgtcccaaatgtcatcgtgacccaagctaagtgatgagcttattgaacatctgacattgatgagcttcttttgaaataggtttcatttttctccaagcacttccttccaacgtacctggtctgagtcctgttcccagttcttgacggcaaaggagcttattggtcagttgcagtggtaagaagggccttcttataaattgatttctgcagacatgactcactaatgtaacttaaacttcagcctcaggtccatgtcacaacacaagcctggccctggagtggggatgtgtaatgggggccatactctctcttctccctccctgtcctgacacctgttcctccagagccaggcaggtgggaaccagatcagagaagaagaggcacacgtccctcctcccgggtgctagtgagttacccactgggagatgtccacatactggctctttcttggggtgcatggaagagttttcaaaagcctgcagggaactttaccctggtaggtcccctataggggcgatctgctctgctgtctccagttcctgccctaacagtgcatccacacaactgttactgctgtaattccctgaccaccgcaggatatcctcttggccattgtatcctcaaggcacttttgccaggttatcgcccattatttcatttggtccataggaatgcatacatttgtaccagacaaaaggtgtgagtgtcaccctcccagctgccttctctcaacttcctgacatcacaaactgctcttatcagccttccctctccacagttatgaaagcaagcaagaggtacaagctcataaactcacgtgcatgcacagactccgggaaatgtgtcacattctcccaagaaggttctcaccaccccctaccacacggagacggatctttggatttcttcagctaagcaggcctccagtcactaaatcagtctccgctcttgttggcatgctcctatctccaaaaggcgacctggagccctggccctcaggcagcataaggagggaacagagcctcactgcctaagacctcttgctagatcagtaaccactctttccatgaatccccctttctaccaatgctcttcttgaatgaaatgtcatgaaatctagtcttctctttacatagagtgtgggggtagcacaacaatccactcttctttagtgaggcatttggaagaggaatttgccacctcctagcattccctttaagatatggaaacacctactgcttattatcctcagctttgggactttagctgaaagccctgacaataggaaatgtctccttcggcatcccgttaatctgtgtgcagctgcattataaatagtattactggcagggtaccatggctcacgcctgtaatcccaactctttgggagatcacctgaggccaggagttcaagactagcctgggcaacatggagaaaccttgtctctactaaaaataaaaaaaaaaaatagctgggcgtggtggcacatccctttaaccccagctactcagatagctactcacttgctgaggcacgtgaatcgcttgaacctgggaggtagaagttgcagggagccgagattgtgccactgctctccaccctgggcgacagagactctgtctcaaaaaataaagtattatttaaattcttggcaatctgagatgttgaccaggtagagggtttatcccaccagatacaataaaagatagatcctattgcatctaatagtaactcagctggccagggtctgtgctaaggcatgcaaaataaacactgggaaggcaagggtagtgacagcaggaagaaaaggaataaataaacctatcacacgccagcatcatgaagatgttaccgagagcccatggctattgggatcctgaagtaacacgaggaaacaaagatcagtttcacacacagaaatagggaagacatgttgatgtcatgaagatcctcaaagggacctcagggatgaccatccttaccgtagctctaaagtgacaacctgagccaggcttacatcacaaagaggagaataagagaaaccctcatcccatggtgacatcccaagactgtctcctgatctagccccctcccatcaccacgccaaccaggaggcgtcagcctggcactaacgcggagatgtctgtgctcagggtctgcctgttttctcttgggagctgtggggatcttgtgttgctcactgctacttcttggactttcagccttctccatgcgcagcatcaatagctgagaaaacattccgaatcacactgaccctatttattaagcaaaggaagaatattctaagatataaggaacagctgattactgctataatgttgtttaatagataagaactaaaggatgttggaaggttgtgacattggtcaaccagaaggaaatttagaaggaaatgttaaccagggtagccttgatgccagccccccatttcttagaagttgagagctaaagggtatcagaacagctcctgagcgtcccaacaaggattcctagatttactcaatttgaagataccatcaattgtgagacacaacaaaaaatgggaggaaataacaattcaccaaaattttaaacattcgatcaatagtaaggtgcttctcaatttcataaatattaaaatgtgatgggaaaaactaatcagaaaaagagaataattaaatgactcctaggactagaagaaaacctcgaaaggtctttcagctgaccccatgccttgaggcgggcccctacacttccgcccaaatcagagaaagtctgactaatgttaaagattaggttcttttcattttccatgccattccctcagtgagagtgaattataatttgccacgaatataaagaagagagaaaaaagtacatacaatttgcatactaaaaattggaatactaatgaagacaaatcactcccctctgggagatgatctgctactaaaatccttttcctctgcttttaacttggcttagtgaaaaataaataatttttttaaactgcagggggtgggcaatgagcttcatttagaaagtatttcaaaggtaccctggctttgtgcattttaaacatgaatttcagtagatgcatttatctttttaactatattgtgcacgcatgctaagttatatatggctcttacaagaatacgaaattagaatctgccccactgcagagaaaagtgaaacactcttcattataccaggcagtgtagggtaacctccggctttgagtcagctgaacctaagtttgaaattcaactttataactcacttcggcatcccacctctatctcttgaacttctgtttcttgatttataaaatggtgcaaataattcccacacgttacattcaggaatcggtgagataacaggtgtatataacactttacacagtgccagggattcggtaaggttttggtctatcatctcggcccctttaaaaacaaccattataatagagtttttcaaagtaaatgctaattttaaagtgaatcacattgttcctaattatgctggtttagattgcaactttcatgggaaatgaggaggcagcattttgtttttacttaataaacaaatggtgcctagtttatgccacgctccatatgaggtgtgagaatggacagagagaagactgtgacacagttctggttccccaaggttccaccatctagtagcccactgaggagcagggcgaagcctcgccagacacagtgagccaggctctaatagaggcatggtaccaggggcagggccctcaaagaggcgtctgacaacctggaacactgaaaagggctccatagaggtacaggaactggagtacagcaagatgtggatgaagcagggtggggtctgcagtgagaactggatgccctgttgctcagaaggaagggaatcggctctcatcacggctgtcagccaaggggcccggggaagagaacacgccttctatctgcatagctgccggagcatccaaaggtccagaaaggtctgggctccttcaactttattcctcagggactctgcaaagcctcagatcaactttctgaccggccctgcttggcttcctcttctcctgtctcaggattccacggcctgcagccccagtgcttttactgcgtttcacggccctcttgtatattagattctaattcccgatgcttcttctcaagaccccttttcctagaaaatccatagaaactttcatggttgctaaagcttagaaaaatgtcttgccccaggctggcttcaaaggatcacacgaaaccagcagctcacctctctggtattgatgcagtttctccagagctgcaatgacccctaatgccatcacaaatgacagtcttggatcaaatttagggtccaatgtagaaagaatgtgggcattgagaggaaaagggtctggaatgtgcagccactaaatcatcatggagcagagaaaacacctgaatgtactgagactaagccattggcttctgaaagaaagacaggagctctagaatttaccacctcaaagagaacattagaaagagccttcaaaaggaatgagaagccccaacctccctctgagcatccttgttcttgctccgacattcctctgcctgctttgatttttctttcaagccacagattcgtacctggcacaacaatgcgcaaactccatagcctggcatttttccacctaatattcacccctggtggagactgatttatgtataaattgtcttggcataacaggtgacactttgtaacttggctgtccttcactgtcaacaggggctcctgaaacatgccttcctcacctgcctggtgactctgcacctgtgattctcagtggctgctcgctcaccccttgacttgctggcagaggcggaggctgctgatggctggtattcatctccccacagtggcacctcatggtcctcaactccaagatgcagagggagcaagggaagacgcaagcccctctgtcatctcatctgatggaaatagtcacgtggtgttggatcaggcagggccctcactgggggacttctgttccagaaccatccccaagctgttaccacctttcgatctcctttggcaactggtctatgatcaaatgactttgggataaactcttgcccaaagttgggtccatggctctgactggatgctcctgaatgagataatggagaaagggaggaggaatgttcacgtctacgacctcccgggaaaataatttgaggctaattaaaaataatttaacttaaatacagttggggtttccagggcaaaacacatctctttggatggcaaggattagaaaaattacattcaaaaaaccaatgctctgaagccccggtttgcaagaatttggcttttctctgcatttttgcaagaaacataaattgtctgcaatacattccaaagatcctcacccaacagcacaagccaaagtgcttacatagcacaaccttgatggttctcagcccaccctcggtaatggataattctcatgacgtgaataatttgttatctcaagtgtgaataaggttagacatttctcctcacgaacggtctaaaaataataccatgagagcctcttatatattgagtcagttgctctttggcaagaaaagaagtgtatgtaaggtgaaaagtgtatccctctaatctttctattctaaccaaattattttatttcatgatctatatcctactaattgcaggtgtcagaaataataggtgctagcacttacatggtacttaccacgtgccagttaccagttgaagtgctttcctgaacacatctaatcccccaaactactttaggataggtattatgattatcaagtgccttttaaagattatgaaacaaaggcacagagaggttaagtagcttgcccaagatcacacagcttgtcctgtaagaagccaagcctgtattcatacctgatgttctatgtgtaatgtctgtgcacttacccattattacactcttatgtctctctaaaaatgtcacataggtgaaaatgtcacaagagtgaaaaaagttaaacatgttcaatatgtaacaaaaatattttaggggttttttttttttgtctaaattgggggatgttcagggtctccaagcaatttgtgaaaattattttattactagtgcaaaaacaaacaaaaaaacccagagatcatctaatccaactcttcccattttttatcaaggagactgaggctcagagtaataaaaagatttccctgagaactaagatttgggtgtttttctcctagtaatcatgaataatactaccagacaatgggcgcttggatcttggtccagatactattaattaaccttgggttaatcctaagcagttttcttagttctgaaatgagaagcttaaaataaatgttttctaaggtttccttaagctgcactttcaatgattctaaattgactgactggtgcagggtcaaatagcttcgtggacaacgaaaaaaataggaaaagggtgggaaaggcaagtagaactactaagaggggtctggaggaatggggctgcatcatcactggagtgggaacagaattctctgtgtttcttttgtctcctctggggactggtctcagagcatgaaagggataaatcagaacatcagcccttcacctgatctgtgtgtgagttaaagcaagacctagagaggacagggaacagcagagtgtagctcagtaatgacttccaaattatgcaaagggagatttggaatcaagctgaacccataatactaaattacagtgcaccttcaagtacagaggaattgaatttcactggggaatctgaggattggaggcctataaacccacagaagggagttgtgccaaaaaatataaccaagcagcaagtaggatgactaaagaaattgtgatgaccttttgtctgctcttttgtgactatgaaaaataaatgcatgcccccttccaaaaaaaagaaaaagaaaaaactgcagcaaaatctgttacaccaatgcctattggagaatataaagattgggaggtcaaattccacatgttttagcagtgagcagatagcataacagtaggaaagaagattggattaaaatctgtaggcttactaaaagcagaagccccataatataaaaggtccctgtaggacctttttatattatgtgactttttttaatgtctaggaaaacatgagctcgcagccattttcaaaagctttgaggaggaccttggacctcccttgaaatgttggattgacctccccatagtgttagctaactctccacacacagagtgaatgtcaggtgacattaaaaagaacagaaccaagacttcccagcagaactaaatggaaaaagataatcgtttctcaatcttggcactcttaacatttcaggctaataattttttgttgtgaggggctgtgctgtatacagtgtaggaagttcaccagcatccctggtatattagtctgctctcacactgctaattatagacatacctgagactgagtaatttataaaggaaagaggtttaatggactcatggttccacatggctggggaggcctcataatcatggtggaaggtgaaggaggagcaaagtcacatcttacatggcggcaggcaagaagggagagtgtgcaggggaactcccctttatcaaaccatcagatctcatgagacttattcactatcacaagaacagcatgggaaagacccacccccaggattcaattacctcccaccagggccctcccacaacacatgggaattataggagctacaatttgagatttgggtgaggacacagccaaatcatatcacctggcctctgcccccgggtgccaatagctttgcccctgcctccaagttgagaccaaaaatgtctcaagatattgccatatatccccagagtggagaggagggcacaaaactgcccctagttgagaaccagtggagtagaatgatgagattagaaagtggttcagcactcagaggcactgaaactcaaaaaaaagaaaaaaaaaagcagtcaaaaccaaaaccccatgtatcattttaaggctttttattcatgttaatcaagctgaaaaaatctggagataatttgagattcaaagttttgtcactaattattttaacaagtattttaacaagtactctccagatgcccattgtattttcaaattttattttttaaagacccattatttttctctcctaggactgtcagctctcttctccatattccttttttttaatgcttgtcaaagtttaatcaacctaattatcagatttgaaaatgaatggctataaaatgtgagtttctaaaaacagatcaatcaacacaattgtgcacgcgcctaataaaaggtttcagggttaggttctccatgccaggaagctgtgaccccagagacagtttctcagcataatagattaacctgcctattaccagcaaagtctgatagctaatggctcaccctgattcaatcataatagctacctgcagtgaagtgatgtatcagattcttaactctcatggatatggtgcttggaaattaggggaagagtgtctgggaatctcaagttaacagaaatgttatgggttgaattgtgtcctacctcctgcaacctaaaattaatatattgaagacctagccctcagtagctcagaatgtgaccttatttgggaatagggttattacagatataatcagttaagatgaagtcatggtgtagtaggatgggtccctaatccaatatgactggtgtcttgtaaaaagaggaaatctggacacagacacagggagaaccccatatgaagatgaaaacagagattggggtgagtcatctacaagtcaaggaatgcccaaacttgccagcaaaccaccaaaggctggaagagagacctggagcagactcttcctcacagcctcagaaggaaccagccctgctgacacctggatctcatacttctggcctccagaactgtgagagaataaatttctttagcttaggccacccagtctgtgcgacttcatgacagcagccttagacaatgaattcaagaagcctatttctagccctgctctaatttacctctgtccagccacatccaggacatgtggcagataatctttcttcaaactggcgtggccaaaatatctcccactagactcaagcaaatggcatcagcagaaattaccttttttaaagtgagtacaattcaagtgatgcccagacggtcacatcagaggcctcaagaactctggcacttcccagcacacttgcaggtttcagccgagatcacttatgtacctaagctcaaaaccattggccctcacagctctgaaactggttttcctttccttctacaagaacataatttttgtgtcttcgtataggctccagaagcttgcatgaaacagatttttttttttttttttttttttgagacagagtctcgctctgtcacccaggctggaatgcagtggcatgatctcggctcactgcaacctctgcctcctgagttcacaccattctcctgcctcagcctcccaagtagctgggattacaggcacctgccaccacgcccaggtaattttttttttgtatttttagtagagacggggtttcactgtgttagccaggatggtctcgatctcctgacctcgtgatctgcccgcctcagcctcccaaagtgctgggattacaggcgtgagccaccgcgcccagcaacagatttttaatgtacttttccttttataaactatgtacagagctgtcgtcacaagaaagcacaaggctctcgaataccttctttgagtggttatcagggaaagaaattcgggagatgcacagttttccccaaagggatctaattcccttttctaaatctttagcttcctgaattaacaggtttaacaaaggtaatccaaaaccaaagctttcacatgagctgtgttccagagattatttataaaatggcctcattgagaagcattttctcacagtgataatattatgagtgaaagaatcctaggcagttcaagaaaacaaaaataactatttaatccataatgtcacagaagcaccattcccaaaaaagcaggctgagtttgacatcctgggaccaagggttcctgtacttccaaagggaaggccacttttcaaatgtttttagttctcccatttattttacttccaggaagaagtggatgttttcatgttaaatttggtttggctgtgcaataggatatagactggggcttttcctgactcaggattaacttaggcaccaatcagaaaatactcatatgactgtaaaattcaaacctccaccgagaaaatttacaggctgggtgcagtggttcatgcctataatcccagaactttgggaggctgaggtgagaggattggatgagcccatgagttcaagaccagcctgggcaacatagcaagaccccagtctctttaaaaaaaaatttatttcaccagcacggtggcacacacctgtggttgccgctactcaggaggctgaagtgggagaatcgcttgagcccaggaggtcaagactacagtgagccaagatcacaccactgcactccagcctgggtgacagaggaagaccctgtctcataaaagaggaaggaaggaaggaaggaaggaaggaagggagggagggagggagggaagaagggaaggagagagtgagggagggagggacagaaaagaaagtttacactgtgaattgaagacctgctccaggattcttgaatcccttcatctatttcaggaatataaagactaaagggagtggcaatttagaatgaaggtttctttggtgagagctggtaatgtcctctagctgagccccctgagctgccatcctcatcttgagtgtgatgagaggggcttctactctagggtgctttaaaaccatgttttctgcagttgggtgactccaaggaccagtgcctactgaccccagaaaaagctaaataaaactgtgaaatttcaacttctggctatgagagcatagcttgcttcaaagcagctttcccttaaataaactataaaagctgaatttctatttaaagtagctatttcaaaccacagcagataaagcaaagtagccaacatttgaggaatcaagatccaaagagaaagaaaatgcactgatatgatcataacattctctgccacatttctcctcctggtgtttgccaatttctcagtggcatggcagaaaagacaaaagagtcagtacacacagttatccctcagtgtccatagggattggttctaagactcacccctccccccaaccccaatacagataatctgtggatgcaagggacttaagagtcacttacaggctgaggcagtggctcacacctgtaatccctcggctttgggaggccgagggattggggaacacgaggtcaggagatcgagaccatcctggctaacacagtgaaatcccgtctctactaaaaatacaaaaaattagccgggcgtggtggcatgagcctgtagtcccagttactcaggaagctgaggcaggagaatctcttgaacccgagaggcggaggttgcagtgagccaagattgcaccactgcacttcagcctggcaacagagcaagactccatctcaaaaaaaaaaaaaaaaagagtcccttatataaaatggcatagtatttgaatgtaatctatgcacatccctttcttatgctttaatcatctctaggttacttataatacctaatacaatgtaaatgctatataagtagttgttatactgtattgctttttatttgtgttatttttattggttgctttcctttttttgttgtttgtttttagacaggatgttgctctgtcatccaggctgggctggagtgcagtggtgtgaaccacaactcactgcagccttgatttcctggcctcaagcaatcttcctgcctcagcctcctaagtaactgaggtgcatgccatcacactcgactaatgtttctaattttttgcagagacacatctctttatgttgcccaggctggtcttgaactcctgggctcaagccatccttctgccctgggctcaagccatcctcctggcatcaaaaaaacaccaggcatgccaagaaatagaaccaagcgattgtaaaaaaagagagacggggaaagaaaatggacaacagaaagatacccacagctctttaaactaaatgtgattgatgtgttcaagaatatagatagcaagatggggaattttatcagagaattgaaatatactaagaaacaatatataaaatttagaaataaaaaattcattagctgaaattaataactcaagaaacaggggtaacaccagattagataaacagaagaaatgattaatgaactgatattgctcattataaaaataactattgaagcatgagaggggaaaaaaggaaatacttaagagtggaattgctctacggaacaagataaaaggcctaaagcatgtgtaagtggagtcccagaaggcaaaggaagagagaatgaacagaaatatttgaagagattatgaatgagccttttctgatactgaaaggcagccatagactcaagaagttctgcaaaccacatgcaagacaatcacaaagaaatctacaccaaggcatattatggcaaaaactgctaagaaccaaagataaggagaaaaagaaacacactaacactttcagagaagcatgaaactttcaaaacactcttttccttctgtaatcttatttctatgaagaggtgcatatgggacccattgactctctcctctcttatccccaagcagcctatccagtaaggtggtcaagtaaggagaatttctctctttacaacccagtcaagcagctcacttcttgaattggaagatgcactctgtgttaatctgtggcagagagtgctagcttccttctcaatcattactctccccttcctctctacaaacagaaccaatgtgcctagctaaaaccaaacagaaacaacatcccctcattatccagcatcaactgtagttagaaatggctatgggacacagttctagccaataataattaagcagcattttttcatgtggctaccaggaagcaccttcaaatggaatagaatcagtcggcacacagttagttaggcttgtcctctttgctttcctcttctgacttgaagtgcagctatgatggcaggagctgcagcaggcatattacaactgaaaatgaaagaaaagctaaagaatttcaaaaatcgatctggacattcttgagctgctccacaaactatcgtctgattatcccaaaacttctttgtcatttgaaaggatcataaaacactaagccactattatttggattgttttgatatatgcagctaaacccaaactctgttagagcttcccttttcttgtggcttgaaacaaatctgtaaaaaaattcttctattgagttcagcttgttgctgctttgaagctaaggaaagcctcaaaatatctgacctaagaagaaactaatcagcttcttattctcacatggcattttttcaacagaagagagagacaatttaatacaagatatatgatcatcaaattctgagcccttgctcaagggaaatctgagtagctaagatgcaagtcaatctgtctttggtctctagtatctacttcagttcagaacagagagcacagtatttaattatgtctcagattctgaacacagaggggaattggggaacaagtttccttccaaatcagagcctatggtgaaggagcagatttttttttccagtccatcacagagctatacttttataaaatacaagaaaactgaggccaggcatggtggttcacacctgtaatcccagcattttgggaagccaaggcaggcagatcacctaaggtcaggagttcgagaccagcctggccaacatggtgaaaccccatctctactaaaaatacaaaattagcccagtgtggtggtgcatgcctgtaatcccagctacttgggaggctgaggcagcagaatggtttgaacccaggaggtggagtttgcagtgagccgagatagtgccactgcactccagcctgggcaacagaagcgaaactttgtaaaagaaggaaggaaggaaggaagggagggagggaggagggagggagggagggaaaattgaattactgggaaagtgaacatttttaaaagcatacaaaatagttttcttaatattatattatcaattcaagagacataaagtaattgtcaaaatgctttttttttttaaagtttcttaagtcttactctcaattttagtacttgtcttactgtgatctactaacaggtcaagtaccagcactggtccacagactacaagttgaatagaacagctattgcaatatcttagtcagctagggctgctacaacaaagtgccccaagcagggtgacttaacagaaacgtatttctcacagttctggatactagaagcccaagatcaagcaatcagtaggtttcatctctccaaaggcctttctccttggcttgcaggtggctgccttcttgctgtgtgctgtgtccccatctggcctttcctctgtgcacttgtatccctctcacttcttataaggacaccagtcctatggagttagggtcccaaccttatgacctcatttaacattaattttctcattaaagtcctatttgcaaatgcagtcacattgggggttagaacattaacatacgaatttgaggagtcagaattcaatccataataagagtaatgcttatataagcttcttcaatcgttctctgccttagcctcgttagaatctgaagagaaagacctctagatgtcctcttatctctgaggggattagaaagtgcaaaaagaaaaaaagaaaagtccctcacagacagtgttcgtttatccacagttcatctccaatcaaaaaagatcattttaacaaatcagcttgtaaacctctccatcatggttctcccaccttcttcatctgttctgtttatctttgcatagatttcctccaaagaagtcctaaaggatcaaaaaaacttttttaatgaatatttcaaagtatgattgaacaaagcaacagcttttgaaaaaaattatacagactttccttactgtgactgttggacctgctgtctttctcaagggttatatttttgtttacattttacttaggtttccttgggatttcattttgatgtgtgagttttagtgtgtgttcccgtagctcagggacaaggatggagctaatagagagcagaattgtaaatcgggtgttttctctaacacatttgtaagagtgtgctagaatactcctgtgctggtatctctatctcttgccagctgtgacccatcttgtgtgcacccaagcagatattttgtcaggaggcccatgaaccacactagtgttcactttgtcttggagtaaagatttttctttctcctttgcctgcaacagcatacatttatactgtcaaatcatatattttgttcctaaagatgtcttcatttctttttctaattccacagcaatctgctgatttaactcacgtctctaagaggtgacagttcaaggaatctggtacatacaacctgatatttataatcagttctactaatggctgcttcagtaagtctactcttgttgataatatttcagaaaatgaatgattgtcagactacttaaaattgcatttgtaaccaacaaataaatatttgaaagccttgctgcaaactatgtacactgagaggcccttcaaagaaaatagacactcagaaagcctttcttaagtatttgcaatcctttttttaataagataaattagaattttattttattttattttattttatttttagcgagagacagggtcttgctctgtcacccagcctgaagtacagtagtacaatcataactcactgcagcctcgacctcctgggctcaagtaatcctccttactcaacttcccaagtagcggaaactacaggcacacaccaccacacttggctaggtttttttttaattttttgtagagatggggtcttgctatgttgcccaggctggtttcaaactcctggactcaagcaatcttcccacctttgcctcccagagtgttgggattaaaggtgtgagccaccacatctggcaaattagaatttttaagtagggcaaagatgtatagactgcagaaatatattttatttatatgctaatgttatatttcatcatataaacttttgggtcaggcgtggtggctcatgcctataattctagcactttgggagcctgaggcaggaggatcacttgaggccaggagttccagaccagcctacccaacatggcaaaaccccatctctactaaaaatacaaaaattagccaggcatggtggcatatacctgtaatcccagctactcgggaggctgaggcaggagaattgcttaacccagcaggtggaggttgcagtgagccgagattgcatcactgcactccagcctggacaacagaacaagactccatctcaaaatgaaccaacaaacaaaacaaacttttggattttattaaatctacaaataaagaccagaaaacttccttgtggaacctatgctcacctataactgttgtgaatgttcaaatcacagttaacgtccagtcatacttttaaatgtacttctaacattttgtttccatgaaaatgtttttgccttattaagacttgcttaaaatagcctgtccaagcctttgtttcttgatctgcaaaacttagagaattggactaacagttaagaggcattttaattcctttattctttttactgacctgcatgtttatcttcttgtgatctagttgttgctattcttgctttaaaatttcacattatatttcttcaattaaaatgtaagctcttgggagcagaaatcataccatgtctgttttatatatcagcctcagtttgattttgctgctataacaaaatgagactaagtaatttacaaaaagagaaatacatctcttacagttctggaggctgagaaatccaagatcaaggcaccagcagattccatgcctggtgagggctgttctctgcttccaagatggcaccctgttcctacatccacacctggcagaagagatgaatgctgtgtcttcaaacgacagaaaatggaaggccaaaaaggggtgcagctagttccttccatcccttttatagtggtttttgaggtggttaacacctcattcatgagggtgaagctttcacgacctagtcacctctcaaggcctaccttttaatatcatcaccttggggtttacattccaacatacgagttttggagggatgcatacatttaaaccacagcaatcccctatagtggtgctactgaaagtactgggcctcaaactatttgttactggtccctgatgaggtcaggagcttataccaaaatataattcaaccacacacatagatctgtttagttgagccaacgtttttttctgagaaggactttcttgatgaaggaatctgtatgttgatttacctttctggaataagcttcctatctcaccataacaaatggttctgggaaaaacaccagtctgtggactgtactttgagtaggactggtctatagagattttctataaaggtctatttaaaattctcagtaaatattggttgtttgacaaatgactcatctgttcacttaatggacactgatagagcattcatgatggaagatggcagtaagaggtactatggtggggcaggatggggacacacaagcctatggttacttacagtctattaagcaagatgacatattttaaataagtggaaagtagaacaaaaaatgtataacaaaggcacaaataaaacaccatgaaagttcaaaagagggaaggaattcatcttacaagtcacttgggagaggtaatctggaaacttctaacttgaaggcggagcagaatgttgaatgatggagttgggtatggggaccatcacccagagcaaacacaggatgcaaggaagctgtagacatgtttaggagaccacccaagtttgcttactactgcctttcctactatttgatttgggacaagcattcaagctctgcacagtatcttgcccgcacctgttaaaatggaaataataaaaatagtattcatcttatagggtgaagatcaaagggcttaattcaagtaaagtgtttagagcaatggccagtgctcaataactgtcaactcttgctgttctcattatcattcatcacattgtttttatggaatgttaactttgtactagctctttgattctttcaatatcttcggttttatgctttagaaaataaaaaagctaccgaagtctttgaactaccatgagaccgagagtagagaagaatggattaagtcagaaatgtgatggttacctacaattaaggagcaaaaggagaaagcaaaattagcaaagaaaacaaaaaagcattatctgggaggtaggaagaaaaccagataaagacgggcagttggaatctgagctaggaaaaaatgttttagccattataacaaaaataataataataaaaataataataacaaatactaacaaaaataataacaaaaataggccattaacaaaatcagctattgggggaagaaaagaagcagttgaatttgagaagtatgacgtcattcacagcaacccttaagggaatttcttcagggtgactgaagcagacactagattgcaagaaatagagaagagagaaaacagtgaggaaagggaagcagtatagataatatactcattcttttgtatttactttctgtgactgaacatgcatgtgtttataggccactgaaatgacagccaacacctaaaggcagcttatctctcttaaagataggtcatagacatctattgttttttctgtcctacatcatccccaactcgttctttaaactacttctacctgtacctcaaacattgaaggtgacatgagcaatatatggatttctcttttttttttttttttttccctgagacggagtctcgctctgtcgccaggctggagtgctgtggcacaatcttggctcactgcaacctccgactccctggttcaagtgattctcctgcctcagcctcctgagtagctgggattacaggcacgcaccaccacgcccagctaatttttgtatttttagtagagatggagtttcactatgttggccaggatggtctcgatctcctgactttgtgatccacccacctcggcctcccaaagtgctgggattacagacgtgagccactgtgcccagccaatatatggatttctaaatgaggtaccagagagaaagcatgagtccgtccttcccgtgtagtaaaaattttaagatgaaaaactttggtgctttcagacgttgtgtttcttccctgctgggctaagccagtcactctgcaaagaaagataatgattccatttctcagacagaagcagattgaagaaatgaagagaaagaatcctaagggcagctagaccctagttacagttacttctgaggcacagccacattctgcctgcccagtggttttcccatgtcacactttcttgctttccatgagccaacatacttactctcgtcttaggtactctgagttagatatgtgcccccttgagactttaaatgacctaatacaagaaggaatatatgcaacgaaggcttggtagatgttggaaatattagcacaatgatttaggacgatggcatgctattcttgaaattgaaatgaaacataaggcaataaaacacttcttgttaatgtgaaagaatgaagatggttaaagacacagatgaagtgggtctaaatctcagtctttaactcaagcaggcaatacatattgtatttttctataactcaacctaattgttattataagcccccatccccctgggttggtggaaattttatcctagttggttctggcctccctgctttcttctccagagttctatcaatgttccagggtgcttacagaatcctgaaacatggctggggagaagggagttgaaatattggtctgtgaagttttctgccaagtcatgtttgtttctgctcatggtgacttcaagtctggtggcttttctgctgtttccatataatgccagtggcaagggactctcactatcacctttgtgccacaccaggggtgcaataatctctactagactaagagcccatctggtatacaccacgagtccaatttctctccgcaattctgctagacaaggcagcaggtgcacttttgctaggatttacgaagagcagatcctctgttctcacatcatccaagaggaatcttctagttttgggaaggactgaagtggggcagggacaagaattcttctttcatgtttttccccaccattgagtccgtccttagttgccctcttcttcttaagagctcagagtatttgaaaccaaaatcattaagacccatcctgtcctacctctccactgagacaatgaacatggagacaatttaccgcttctatggacaggaaggaaaagcaggaaatgttggaagaaaacaagttgatagaggttaatatctcaaaaatatcctaacactcagagaactttagaaatgaaataagagaaaatgagaggagttctcattagatggacttgatgatctcggtaaatgaagagatgagagttttctgtggggagaagagagctgaggattgacagctgattcagaggattgctgaacagcagaaggagctgggcacccagacaacttgaacttacccccaagccctcagcactgtttctcagcttcctctaccaggtcctgtcacccagaaatggcatgagaaagggttcagtaagaagtatccagacatggatgtgacaaatggggacagtgaagggccaagggtggtgagggatgctaaggtgctggcgaggaaactgcacaaaggagtcacgggatccaggctgggtagagggacaacggaggcagactggggcgaagagttcagacaagagaccagagctgtgggagcagatgtcccagtgaggatgaagagccacttcaacacaaatgagaacatgagggttggagaagcagagaatccagatctgacaaagtcctaggagatgataaagaatactgctggaaggtccacataccctgcctatgctgagaaccaggtctgctattaaacccagaaacacccactctaagccatcatccaccccaggaccacctatatcagttcccgtggactctctagtaagtaggaactggattgtcccaaggaaccgggaactgtccccaccaagtatttgcttaattcaagatttccaaagtcttatgaaaacagggactaagaacatgacccataaggcacacattgggatattagcaatgtcagacagccgtgtggtgaagaacgccacagagtctaaggtctgctgcatgggaacggctgaatgtttccacaaagagggcattaagtttttaatcttcattttgcacatgattttcgctcttctttgggtaaggcaaatctcatcactggtttttgttgttgtgttttgacacagggtctcactctgtcacccaggctggggtgcagtggcaggatcgtggctcactgctgcctcaaacacctaggctcaagcaatcctcccacttcaacctcccaaatagccatgactacaggcagcaccacaatgcccagctaatttttaatttttttttgtaagagagggtggtctcactatggtacccaggctgctcttgaactcctggcctcaagcagtcctcccagctcagcctcccaaagtgctgggataacagccatgagccaccgcacccggcctcatcattggttcttacattttaagtttctctatttactgagaataatacctttcactcagcaatattgttcttgggattaaagtgcaaagtgtacacttaaagctggggaattggcaaacatcatgattttaccatctccactgaagagcactattttgcatttctagagaaatttgaagcttctgagagtttcagtgtcatcagttggctggtgcctgtgaccttcttacagaacgagatggtgtattctactttttgaataataaataggaaaaacaggcatattctcaacagagatggcatttgaataaaagtgttctcagcttcctgtcttttattcaggaaactcgtttctaatcctgctttataaacacacacactctttccttcctgttgatggtatatttcaattgtttctgcttgctgaggtcctcaaaacacaaatgcaatcatctctatgccttgtttacatttgcttcttaggaaatgcaataatcttacagaaagcctcactaccgtctattttaaaatctggtacactgggcagctactaactagttatacaccaggcacataaggaaataaatcaagcttgcatggaggatccccagccaagagaaagcttttttttttcttgtttttttttttcttgttttttaacattggattggcaaatcgtataatcaggatctctctaggattttgtacctggcataaaggaaaacaatgttgtggaagctgtttcgagggaacctgaaatgctcaagggcatgaggggaacttcccaactctcacttgaaaagatacagacaaaagcacacagatactgcactgcaaaaatttgactaaggattgcaatagaattggccaacatctcaacagagttacatgattgccagattctctgaattgcctcaacacagagccattattctgagtctgggaatgctaaatgaaacccatgcctactatgtatgctttaaatcagaaactaaaaagaccgattttatttcattgttggtagtatgttgttttcattttccgtttatgcttcttttgaagtacctgcttcttttccctattaagtaatcatgaattacacttgcaaagtacagtatcttttgctttaaatccctctttgtgcctgttttctaattcatcctcaatagacaggacagctcttgtccaaatttcacagatgaaacgcaaagagggaaagtgcagacttaagcaaagcctttggcagaatccactacccagagagaggcgcagaagcaagacacagtctatgcagtctccctggtccaggtcatgggactaccttgggtccagtcaaccttggacaattgtacgaagccttacaaagcaaccacgggaaggatgacacttgtttagtacaacaccatattaaccatgtatttccaatgttttgacatcttggggccttgctaatcttgaaagcactgtcaccccctgccacagacccccaccaccacttccccaatgactagaaatagtaaaggactctcttgcaagcatgctttccatattcaaaccaaccaatctcttgagaggcaagagagcccatgcctctcaaccacctcttttattgggctctgacactctcggccattatttctttgcccaaatcaccccagagccaggtactagacaagtgaggacatcttctgcacctcaaaaactgctgaaattattcaaacgaaccaattctaagccagcttaccctgcctccccgctctttcccatggaaaccacagtaaagagtcttgccgatgttttcccctctctccctctgcctcctggccaatgctgatgcttctctgtgtgccctgactccccgtggtatggcatgtatgccagagttcccctccgcttgaaatctatgacaagtcatcttttcaatggcagtcatctactgacccatttgcctcactatatctgaataataatgaaacctacatttgaaaacatgcacatttcttctcttctattcattaaaccctaaacaaattaaaaattaaaagaagcttggaccagcagatgaaagataatcctaacatgtgcctctccctcctgagcccctgcaaagccatcacatgtgcaatcaacatgatttctgaattggaagattgtctgctcagcttgagttattccttcaagctgaacaggcaacagaaagcagacaagaaatggcctagctgatgataaatgcctaaataaaaaaaaatcgtaacagtcctcctcttacacagacctccacacacgttcaccatagggtgattccatcagtgcagggcttgctcaccgaagggattggttagaagtggcttaacttccaataggacatttgcattgtaatgggagcatagagcaactactctcattctttaaggcctgtattggaaatatttttggaactgaaacaagtttgagagtttatcctgaggttgggaggtggggatgggagataggaccagactttttgaaaaattctatttgtggttttctcaaggtacagaagactgccagggagaaaaaattatttcttgtacatttgaaatacaatctgccttttatagattggttttaagatattatactcttctttttatttcaaagagcagatgaaaatggaaaattgttagctattctaaaaatcatataatcataattatcaatttgaattcctattgctaattcttgctactgcagtgaaatgatttatcataaaacacatcttgggattttaattgtgtgcacttgaattgtatttgcatattctcagcacacttcatcattttcattcctgataaagcacttccaaagaaactttgctctgtcagtttaagaatgcattgttttttcatatcttcaaaactatgggtaattgctatcacattctgaatatgtttaggattagaggtagcctggactttatgaaatggtgccaccaaggtaagatttcaaaaatgctggtctaggtgtccaacacttaatgttattcatgtccacatcctgtagaatattatttaaggattttttgaatgatggttgaaactgaagcaatagtatttcccttgaaagtgaaattttctcaaaacctgtcttcctcctacgtcgttaaggaaccaagaagctacaaaggaaaggaggctgttacgacattaacctaagggaggagaccacccctcatattgtcttatgcccaatttctgcctccaaagaaagaagtaaaaactaaaaggcagaaatgaaatccacaagcagacagcccggcaccacactctggacctggtagttaaagatcgacccctgacctaattggttatgttatctatagattacagacattgtatagaaaagcactgtgaaaacccctgtcctgttttgttccgatctaattaccggtgcatgcagcccccaggcacgtacccccctgcttgctcaatcgatcacgaccctctcacgcacaaccccttagagttgtgagcccttaaaagggacaggaattgctcgctcagggagctcagctattgagacaggagtcctgccaatgctccccgccaaataaaccgcttccttctttaactcggtgtctgaggggttttgtccgcggcttgtcctgctacaaaccaactggatcctattccacggttccttctcttttccttctttcatccttgactcatggtccccagcatcatgtttttcccctctgaggacaaaatggactcagagtcatgaacaagcaaatgcatcacatgttttaaaaaatgatagtaaccctatttaatgaatccaacaaaagcgcaaacctaacccttcccaccatcgaagaacaaagctaataattaacacatatcacttatttaagctttatttgtgtacctcaaatgtacattgatataaatgtctagacaatggaaagatcttttgcagagttgaggattgttcactgaaaattaaccctaatctagccaaatatatatatatgtgtgtgtgtgtatatatatgtgtatatatgtgtatatatatatatatttgagttaatatatgtaaactcaattctttctgtctatatattgagttatatatattgagatatatgtatctatatacattgagttagtatatatatataaactcaattctcttaggcatcaatgtcaaaggtgttatgatacaataatgcagtaaataacatagctgcaaaatatttaaaacaaaaattcagagaagtacagaaaaaaaacaggcacttctaccattatagcacaatattttaacatactttttctgacactagatcagacagaaaataaattggtaaggatacagattgaacactacccaaaaattatcttatgtgcatatatggagcactatatcttcaaaatacattattttcaagaacatgaagaatatttatatttaaaaagattttaaaagtgaccacgtcttaaagtctttaaacatgtcaaataattgatctcatatagatcacttttcaaccaaaagtcaatttaattgttacttataatgacaaaaacatatagaaaaacccccatatgtttgggaatttaaatgcacaaatttaataactcataggtcaaagaagaaatcacaagataaattataaaatattaagaattgaaataacaaaaatagcacatgccccataaaacttgtgatataaaggtaaagtggtatgtagagtaaaatttataaagtaatatgataatagaatagtaatagaaaagtcaatatgctgaaaatttatctatatatccaaagagtgctaaagggatataatagaggaaagtaaacacataacagaaaggaatggtgatgtgagaacttggttatttgaaagaataataaaactgacagccctctaacaagtttaatctaaaaaaagagataaaataaataatattggaatgaacattaaccaaaattatagacactatgcatatgaaaaagataacagtactaataaatatgaaaacagatgagcagatcattgaaaaatataatttacaaaatggcctagagaacaactaaaaaacaataaatatgcttattaactttttttgaaatgagtaagtaaaaaacaactttctaaaaagaaaatattagttccacgtagtttgattagccacctctgggaataagttaattcctgaaaaggtaagttaattcctgaaaaggtaagtttctaagaataaaaggagagacgctccccagttcattttataaagctagtatcactttgtatgaaaaactggcaagggcattataagaatgaaaaattacagaccagtcttccaaatagcaatgtaaaaatcatatatgtgtttacatgcatgtgtgtgtttttatatatgccaaaattatatatatttatatatggttcattcagaaataaaaagtaaaatggcaagccattagtagaaaaagatatttatatagagagtaaatatatttatttatatctttatatatgacaaaaacatacattgataatttaacatttttaatgtaatgtctattaaccagtaagaaaaaataaagactatccaattaaagtgggagggaagacaggaaaatagacctgatctagacttcacaaatgagaatattaatgatttatcatagcatggaatgaaaatgatgaagtgtgctgagaatatgcaaatacaattcaagtgcacacaattaaaatcccatatcatgattaatcatagcaaatgtgtgtgtattcctagcaataaattgagcaaaatatgcataagactatgatagacatattaattattaaaagacttcaaatacaagatataccatgtttgtggattagaagcagcaatataaaacaagtcagttctctgcaaattcatgataaaggcatttacagtctacgttgcaatgaatttgtgtgtatgtgtgtatatttaacttgtcaaaagaaatttccaacatatatatggaaaaacatagagccaggacaaccaacacattttaagacaacaagttagtgaagcttgctttaccagatatcaagaattcttacaaaatgtttacattcatgacactgtagaattatcacagggaaaagcaacagatcaatgaaacagacttgaaacttgatttatgtcagagctggcattgcacaccagtgggaaaagaatagactttaaataaacattacttagacattgttattggtttggaaaaaattaaatcaaagccctttttaacctcttgcacagaaacagattccagatagattaaagacataaatatgaaaggcaaaactatacaacttttagtcaaaatataggacaacatatttgtgatattaggagaacgaaaaaagtctttttttttttttttggtagatatggggtctcaatatgttgctgaagctggtctcactcctgacctcaagcaatcctcccacattggccttccaaagttctgggattacaggcaggagccaccacactgggccaggaaaattgtcttaagatgcaaaagatgcaagtcattttttaaaagagataaattagctaaattaaaattaaggatttttggtcctaaaagatatgaaatataaaaagacaacccacaaactgggaaaaaaaatgtttgccctagatgttactggcaaaggaatagtaactgagcaaagaacttctgcaaatcattttaaaaagcaaatgactggtaggaaactgaaacaaaaaatgtaaacagttcttcagagaagagaaaatccaaggaccaaaaaaatacaagtaagattcttagttttgttaatcgccaagaaaacaaaaattcaaaccacaattaggtactatattatgacttccagactgacaaaagttaaagagcctaacaaaatctaatgttggcaaggatatggaattatccttctggtgagattataaattgagacaagcatctttgaagactgtatcaaccagcaagtgtttcttctagaagacaggtgcatattcatagcagtccctttcataataaaaatagcaaaaatccaaatgttcatcaaggatagcagaggtaacaaactatgtgagagtcatgcaatgaaaacactgccttctagaagtgacaattaataatttacaggtaaatgtaaaaacatggagtatctcagagacataatgttgaactaaaaaaggaaatatcataacacatacactataatttatctatataaagttcaaaaatatacaacattaaataatatgttacttagggatataccgtctgggaaaactaaagttacaaaaagagagagataggctgggtgcggtggctcacacctataatcccagcactttgggaggccggggcgggcagatcacaaggtcaggagatcaagaccatcctggctaacatggtgaaaccctgtctctactaaaaatacaaaaaattagccagacgcggtggcgggcacctgtagtcccagctactcgagaggctgaggcaggagaatggcgtgaacccagaaggcggagcatgcagtgacccaagattgcaccactgcactccagcctgggcaacagagctagactcagtctcaaaaaaaaaaaaaaaaaagagagcgagagcgagagataaacacaagttaattcagccagggtggtttcctctgagtagagaggaaagggaatgggacaaggacttcaatggtaacaataatttttttttttttggtagtgatagtggtggtaaccaggtgagatactccagatattcactgtatcattagtctttatattttatgcatattttacaagtattttgggggtttcctcaacattgaatttaaaattttttaatgaattgtcttcaaggattgtctttcaagaagtagtggcatatggccgggcgcggtggctcacgcctgtaatcccagcactttgggaggctgaggtgggtggatcacgaggtcaggagatcaagaccatcctggctaacacggtgaaactctgtctctactaaaaaaaaaaaaaaaaatacaaaacattagcctggcatggtggtgggcgcctgtagtcccagttactcaggaggctgaggcaggagaatggtgtgaacccgggaggtggagcttgcagtgagccaagattgtgccactgcactccagcctgggcgacagagcgagactctatctcaaaaaaaaaaaaaaagtggtggcatagatggacaaagagttgaaaccttacctaaactggatactctggctgaaatatgacagcagggacaaaaaggatcagctgcagagctttagtctcagaggaagtggcatagcagatcgaaaaccaaaggagaggctcagatgtaataaaacaatctggggatccagttactagaatgaggtcataggaaagggctagatcacacagaacaaagccagaacccaaccagggctaacactccaagtgaaccagcactaaggctgaatcatttgaattattgtcctgagttcctttgtcccaaggaaaagcatggatcccattgctgttgtacagggttgaatattaaaggaggagcttcagagaatcaagccttaaacgagaagtctgcaaaggtgagaagctaagcaggtctttatatcattgtcaagaaaaaaaggagtttcttcctattttacaggtagaggtcccaaaataagttaaagtgacttatctgaagtcatttcatcatcagtttggaaatagaaatagaatccatcagtcttagttctttttgttgatgccatccctggtctacactccttcattcataaattacttagcagctacacacactctatgcaggaggcaggccatgattcacaggcttaggtgtttcagacaaggttttatttctttattttcagttcccattttttttttggctctaaaaatagcagctgtgctgaacagtactcaatggaagaaagaaaggaactcatttacagagcagaggacaaaaatagtttacccagcatttatactatgctctttggagctcagggtcaaagatttcagcaggagttttctttagtaacctaaatttacttactttcttttactacatcaaaatggttttaagtgtctattcacataacaatgaatgtgagggtctatccaatgccaacaagttggatcactactgaggtggaaatagcgtggcttaaacaaatcgacagcatataattgaggtcacaaaaagatgttttgctggcaaaacccaagaggctgtggtaataaagtatgcctgaaaatgagagtagaaaagtatttccctacgtaagtgttacaactgcatcagatgttaaattcaccttcagaattatcttgctcaaaagagtagacctctgcttcctaatggaaagaagaaattttaaaataaaacacatttaaacaagccatatctatctaccaccaattttctttctttttttttttttttttttttttttttttttttttgagacagagtcttgctctgttgcccagactggagtgcagtggtacgatctagactcactgtaagctccgcctcccaggttcacaccattctcctgcctcagcctcacgagtagctgggactacaggtgcccaccaccacacctcgctaattttttttgtacgtttagtagagacggggtttcaccgtgttatccaggatggtctccatcttcctgacctggtgatccgcccacctcgaactcccaaagtgctgggattacaggcgttgagccaccacgcccagctgatctgccaccaattttctgtatgacctcacataagcttcctctgagctttggtttcccaactggtcaatggccattcctggctccccaaagagaaacagttaccagaacacctggctgagcgtgaagagtcattcaaatggcgaattggaagtacagctgagattggattccatggaattttctcatgataaccctaggaatatatgggggaaatgggtagaagataagagatccagctattctgattcatgaattgcccaatgagaggggattagtggtttctttttaatctgagaggatgtattagatttctattggtgcaaaacacaatacccaaaatttagcaacttaaaacaccacattttattatctcacagttctgtaggtcagaaattcagtaagcctggctgggttctctgcttagaatttcataaaaccaaagtcaaggcatcagccagtctgggcctttatctggaggttctgcagaaggatctaattctaaactcgttcagtttgttgacagaattcagctctttgtggatgtaggtctgtggttcccatttacttgctggctgttaggtgggagcatctctctgcttctaagcagcgcctgcatcccttcatatggggtccactccatggtcaaagttagcaacagtatgttgaatctcctccatgctttgaatctctgacttctgctatcagtagagaaaacattctgcttttaagaactcatgtgatgagccgggcgcggtggctcatgcctgtaatcccagcactttgggaggccaaggcgggtggatcacgaggtcaggagatcaagaccacggtgaaaccccgtctctactaaaaatacaaaaaaattagctgggtgcggtggcaggtgcctgtagtcccagctactcaggaggctgaggcaggagaatggcgtgaacctgggaggtggagcttgcagtgagccgagatcacaccactgcactctagcctgggcaacagagcaagactccgtctcaaaaaaaaaaaaagaactcgtgtaattagatcagacctaaccagatcattgcaaggtcatgtgccatgtaacataacacaatcatgagagtgtcatctcatcctattcccagttcccatgaatcagggcagggcatttttgtggaggccactgtagaaattctgcctgtcacaaagaaagtagcggataagtcagtaacataggttttggtgaagactgatttgctttcaaattccagctctgtaatttgagtgggtttctgtttaaagtcaggttaaattgctgaacttctcaagcttcgctttctgtagattacaatctacttaggagcagggtaccaactgctacttcccatatactttgcacagtgcccaagacatgccagtgtttgcaaatatttgaaaggatgaatgaatgaataacattgaaagtcatccccaaaacatactataaagctgtatttggccctgttttgtcaatgtttctttcattgacttgggccaatgagattgtgttaatgaatttacccaaactgacttgggtcaatgaacaaaaacggagaagcaatgtacattaaagagataagtgaaataaagctgggccaaacattgggtaacacagccgaaattaagaagagtcatggcaaactaaaaaaaaaacaagcatttcaatcaactaaaatgaagattaattagtttccttaatgacttcggcagctaggaacctcagagctaggtttttcttaactcaattacagttttcccttagcctaggttatctagcatagttgccctgcctcttgtcctttgtctctaatgcttgatggttttaatgtgatactttgttttactgtaaatcacctgaaagcttattaggacgtacacaagatataaaatatgacaaaatggaaaaaaatctgttttctaaaatttctggggtcctaaagaaaagagcagaaagggatttttctcaaggagatccagaaacagaatcactttcttaaagattcacataatgaatgggtcacacatggagagtgtgagcttgggcaaagctaggctggaataggctccaaggcaagatggtggaggaaatggccttacctgatcatttttccatcacactctgtgcccctcccaccctgaaacttcagtgaaagtcctaatctgccaaaatgctattatgtaaatgggatttttttttcttggtgcagatggttaaggccaggtggagaaagaagatggcacaaactgagttacatagacagaaatgggagtaaggaaaagagagactttgagctattatacatctttgaatgcttttatcataattgatgagacacaggaagatgccacaggaagactgaaaaaataaattaataattatcagataagctttagttcctaccctcatgtaccctaaaccatttggcaaggttagtcctgaagaaattcatccatttaatgagggattcagtgctctctctctagatttatttttaaaacctaagattttgaaaatatagacatctttgttatgtttataagatttaaaattcaaatattttgtagatttaatacctgtaacatataatgatatgaaagtacatagatatatgaatctagatacttaagacctggagttccaataaggcagcttgtaccgttttagagtgacaaaaaaggtatcagcctagaaaaactttctatcaagtgtggaaaatttaccctgatctttccacatctccatcatatgcatgtttgagctacaataaatttaaaacagaaatggagcaaggggtccctaagatatgcaaaacaatccagaaaagtaactgtggaaagaccaccaattctcccttttcggggcacacagagacaaaaggttgaatacttgctaatgggaaaaggagcagaactaatatgtttcatctcatccaaagcagtcaaaggcagctatgttttctctatgttctcttctctccctttagtgtggctggaacaatgagatagcagagctgtaagacatagcagcccagatccctgagtcactataggagagctccaaggagaagtgactcactgagtaagacttagacaagagtcataaataactttactggattaagcctgagatttgagggtgtacttgttactgcagcatagtctgtattatcctgactaataccaaaacattattccaaatcataaacacaaatatttcctgatctgaagtcaattgggattcaactgtttcaaattacctacaacacaaattagacattatagaggaactagcaaaagcttacttctttatttatagatatttatcatctactgtcaactaataatagataagaaaatagccaataaatcagggacatttacaaaatgcacagagattttgttttgttttactacttccaagcacctcccagatagtagtcaccaaagtttaatttaaaaaatatgaattttggctggatgcagtggctcacacctgtaatcccagcactttgggaggctgaggcaggtgaattgcttgagctcaggggttcaagaccagtttaggcaacatggtgaaaccctgtctctaccaaaaatacaaaaattagccgggcatggaggtgcatgctccccagctactcaggaggctgaggcatgagaatcacttgagcccaggaggcagaggttgcagtgagccgagatcatgctactgcactccagcctgggtgacagagtaagacctgtctcaaaaaataaaataaaaataaaaaaatactaattttaagcaacactgaaaaattattcctaaccaatgttctgaaccttatcagaccccagcttattttgccacataggattagtgccaattaggttccagcacaaacaggtgtttttaaagcctccagtcctggcatcatggggggtagagaatgtcatctctctctgggtcatccgaatcgttcttaaaggcttcctttaagacgtgagcttggcattctatttagctggtgaattggggatgaatgtacatttttcttctaagccttgaaagtttaatccattctgtgcaagataaatctcagcaggcatttggggaaagttgaatttactgagaggttcatatgtggtacattatttttgtcaaatagaagatactagctgccaatggggttataaaagcaactgcctggccaagatttgtgctgatcactatgtttatcaccctcatgagtaactcctagttctcaagtcattgtttttccatatacatttttcagacatattcattagtatgaggaatgtttgatatcaacatcaattttgttaaatctccgatcagctatcccaaacacatcaggcaacactattgaaatgctgaaggctttatataaaatcatgaatactgttgcctaactaaaatatctttgagaaacacaaaggatattagtaactgtatatctttacttatccaaaccattttaatagagtagataaattaattaaaggatggcaaacaccatttttgttaatatatttgcatctttcctatcagcataacaaatttttctcacaatattccaaagaataatttagcctattatataattttcaaaatcatccagaacaattttaggcatcaaaattccctttgaagttttgtcagtattgagctagatttgttttctctgttaatcatacacatctcctactcatattacccgcagcacactcagcaaatatactccgtgtccactgagcaaaatgcacttcctatgtaagctaaagagagaaacccataggtaagaagtttcttaattcatgtttttcacttgattttctttgtggttactgtttaactttctttaggtcttattctttcagatacgattagatttgtgactaacaatactaataacatgtatatatcctaaagttgaggcttagacacattaggagaaactttcctaatctcctaaattttggaatagaaactcaccactcccttctcaaagacctcccttccccacctatgtctctattatgggctgctatattttgagtttcttgacaccaaaagcgatgtattattcatttgaaatttccatatgacgtagccagcatgtaatacaaagtaggtcctcaaaaaaatttgaactatctgaattatctgctcctagaaggcacttttgaaatcatggaatattatcaatttttagaccattttaaattgaaatataacaaacatgctgaaaaatacacacaacataaatttaataacttagaaagaacctccatgtaaccacttccagatcaaaacatggaaaattgccagcacctcagaagtccccctcaagtcctcccatgaatactgtcttcccaaaggtaacgactatcctgacttctaaccctgtaatgtcgtttttcttgtctaaaaacttaaataaatgggctcatactgtatttattctactatgcctgggtcctttcactccacattatgatcgtgaggttcagccaggttgttgcctatagctctagtttggccattgtcattgctgtgtaatattccattgtaagactatactgcaatttatttttccattatactgttgatagacattaggttgtttatggtgaagtccagacgtgcacattttccagttatgtggcaaatatctgtagcttgccttgaaagcaaataatttttcatttatgcttcttgacaaaatgcaaggcattctgcctgaccctgtaagggtgtacatatggagtgctactgttgaggttttttgtcagctgctggggcaaaaataaactccacctagggtgggagatatttgaccagagtgtgtgagtatgtgtgtgtataagaggaaatggggtgagaagagggtggagagctataaaagaacaccattatccccaaattatccccaaaccactggacagattaaaaatgattttatattataacactgatgagcaagtttcttaatccacaaatattcttgactgccttatacatgccaggtattgtcatgaccacagaatatacaatggtgaattaacacacacacagatcctggaagcttgggtctggttctgtgaaatgaatcaatagaaatgaaaccaagtgagatataccagccacagaaagacaaatactgcccgattccactttacatgaggcatccaaaagagtgaaatttgtagaatccaagagtagaatggcagttaccaagggctgggtgaagggagaaataggcagttactgacaaagaggcatgaagtttaagtcaggcaaggtgaacggaccttagagatcagctatacagtatggtacctgtagtcgacaataatgtatggttgactcaaacagttgttaggagggtagatctcatgttaagtgttcttaccacagtaaaacagaaaaaaaaattaaaccaaatttgctctactattaaaattagtttattgaaatagaagaagagttggtgccatgttgatatattaataagggaagagagggattcacagcttgaaaggtgggattctaggtcattctacaggaagggctccccttgctgctgccactgattctgttgtgtttgttgccagaattgagtcttgactttgaagagttcacaaggcaccctttgctgctttgtctggtttatcaagaaagtggctgcgcaattcacagagggggtaaaaagacctgaaaggagaattaagtcaggatgatagacagattctagtgatccaaagaatgagttcactcttcagtagaaggcagagaatccatatcctccgtagtataatggtcggcaacagctgaatccatagcctccgtagccacagccatagcccaacctgcggaagctgccatagccgcagccatagccatagccccagccaccaaagcctccatagccatagcccaggcctccataatagcttctgtagtagctcatggttcagcaactgtagatgtgtttggaggtcaagggcaagtttcctgagtacaactatcaccagcttccctgggacttttatacatcctcagtgattagtggggtagacttctcatggcgtagattcaattgcatgaaaaaaaactcactcatcttaaaactgtaggacaattcctgacactaattaaagatgttttcattcgatttctgtgcagtttggattccacaggatgattatgctgtcttcaaagccctcttgctttgaccatcatagttaaagctctataatcagacataagagcagcaatcagctcccattttgtcacctaaaattgttctttcattacagccccttcccagtatccaattcttaatgtattccttgcacaaatatttaatgcccaactaatgcatcccaggcactatgctcagagctagagatatggctgtaaataagaactgcccttcccaatcccatgagtttttccccttcatctttgttatttaagttagtgaagtaatagaagaggtacacttactgtataaatccaacaaaatgtagctgatagcacaaaaggatcacatttatttttttaagagagagagaaaaacccaaatggaaaaattttgtttccttacacattactacccttttaactcaatgttgtttatgaaacttttgatagctcttagctcttactgcaagactttttcattattcaatgtttatataggaaataacactaggggcaagagccgtgggtgtgatttttgcaaagtgataccatattcttcatctttgtaatcttctttttaaaaaataatcttctaaagagattaacatctgagtactggatctacccatctgactccacagtcacaggtaggcaggcagccctctctgccttactaaattcctaacacaatcagcaaagaggttttaaaaagctgttttccaaattctgggattccatcttctgctctctaaggaaaccttaattaaactacaatttacagaaatatgtaaaattaaaaatacttaaatatgacattttctttttgaagaatgaagcccactgaagtgttcatgataagggtcagaatcacttctacttagccattggtatcaaaaccaatttcaagcacataagcagtacgactattctatatactattaataatcacttcagatagaataatataatatcagaactggtgtaaccctcttactttacagatgatgaaacagaattggagaagattggtcagatcacccagtgagtgacaaaacccagactagaacctaaatcattcactttcacctgttttttttcatcatcacatttttatagatgttgtacaacaaaggcaaaagcaagaaatattgtattatcacaacagaagaatgaaaatgctcctttgctttctcggttggtgagctttctcattttgatttttgatctatatgctgattggtctgttcctttcctttgggccagaactcaaaggactaaaattagcaagtggacactgaaagtcacatccacttattctcaatgagattacaatggagatgcctgttgcattgattgttcaagagatgtaaaactgagaggggagaacaaaaataggttcaaaagttttgaagtggaaagttgaagcccaactctttcttgtcttagagttaaaagtatatgtattcactaagagataaatattaaagcaaaacaagatgtaaaatgggactcagttttagctgagaacctgtatcatcagtgacaacagctctcacatccccaagaaaggtggtaatctacctaagaaggacttgcaaagggagctacagaaacctagatccgcagtctgcaactaattgaaatcacctttgcaataattttaactgagaaaattataacagtgaaagagatctgatctaaccgattccttcttgcttctaacctctaagctgtccttgttcattcctgggtgtaggccaaactaactttgggaggaatttagtttatagtttaacttcaaaacaaggatgataacagccctttcctgagatgaacccccttcttgcatgaggaccagtctgcctttgtaggactaacaaatgaactataagattagaagccaggtgtggtggctcacctgaggtcaggagtttgagaccagcctgacctatatggtgaaaccccatctctactaaaaatacaaaaattagctgggcatggtggcgggcaccttgggaggctgagacaggagaattgcttgaacccaggaggcggaggttgcagtgagccaagattgtaccactgcactccagcctgggtgacagagcaagactccatctcaaaaaaaaaaaaaaaagattagaaagtatggcttcagagtcatgccaccagaggctccagctgcaagattctcaacctccctaagttgctcctgggaataacatcactgtcgtaaaacctaagatcagcacttgaaatattttgcagactttgccttctgatgcaccaagggatgccacccagacaagtaatctggctcaaccagttctgcaatcccacccagaaacagaagatagcaagaaaacccacttcaacccgctgatttcatcctgacccagccactcagtactccccacttcccgatcccctacccaccaaattatccttaaaaaccctgatcctcagattttcagggagactgatttgagtaataacaaaactccagtctcccatacagctggctctgtgagaattaaattctttattccaattcccccatcttggtaaatcggctctgtctagtcagcaggcaagaacccattagccggttacactaagctcctatctccagtcatgaaataggctggagaggccaagcgttaggaaggggaagagatttctttggaaatgtttttcaataaccttttctagccagcttccacggaagtgtactgtatcccttgaatttggaagacacagccgactgctgactcagggctgggaaagtgactacaggtgagagacagggctgaacggtccatggcaatgagccaaggctgagtttcagagtaactgtgccctcatctgtgactgttcaaagatacatggttcccggctaccagataggaatctagggtgggaataccaccgagttgatttcaaagggatcctggtcaagagagtgaagcaacctcagccaaagcaatttggatggtcccatgagatacagaaagtgagggaggatgtgagcagtccactagagggactgttataccagagcactgataagaggcccatgagtgcaggagtcagctccgaaagatccacaattcagggaaccctcttgccagattgtcagaggcatgcgtctctcccctactccccgttttaacaccggaagagtcagagcagcctagagctgagaccaatgcttaagggagaggtctgccctgcctctcttaccactgccagtttacaggtttacagaggaaaggtgaagcccaactctttcttgcacaagagttgttaaaagtaatatatttcagtacagtagaaagcataagaaacactttctgtggcagtcagctagacggtgcccaggttcttagaaaaaccttttccaaagaaatcacttctacttccttcacttctaatatgagattataggaaagaaaaaaaaagtcatttctccttcctaacttggcctctccaacatatttaatgactggggcttagccacggctggtacaggctggcaggggtctgaaagctttgtctctgaaagtttttgaagtttgattatcactgagctgtacattttcaatcttgaactgaaaccattcttgagactaaaataatcagagagcttgttttgtttttattaatctaaaagagaaaggaaatagtatggcacctgaaatgtgactgaaaaaagagagaaaaaaatagccttcaaaataattcttaatggaagttgtgggaggaaaaatgtaagtcatcttctaaaaatgtaagtccttttgagttccacttattcagcataacaattataaattataaaatatatttagtagcactagtgcagttttggtaatatgcacaaattatacctgagaaagtactgatctgatattcgtggtaaaatcattcctccgaactgagctgacttacagagctaacgagatatgtgtgtgtgtgtgtgtgtgtgtgtgtatacacacacacatatatacttacatatacttgcagagctaactatatatgcacacatacatacacatatatacatacacacacatatatacacatatacacatatatatacacatatatacatgtctacatggtcagtgatgtaaggagactatttttaaatgtatataagcagaaattttgtgtttatataaaaacattgatacacacttttatttttttctccatttatgggccatactaagttttaggatgtaaaagcatagcccaaatcctggatgctatgtgaccccaaggtaatactcttgagctgcttctgccagagggctgattcatggcttcacaagtaaggagccctgatgttctaccaaggggagtgtgtcttcagcctggacaccaaggagaaagtgcttcttcccactcaagggaatccaaacacctctcctactgccacagcaaacagaacctccatcacatcagaaaaacaaatgcagctggaaaaagaagaccacagagtcagagcattcaggccagcgagacccagagctgcagtctcaggccaacgtttctttaaggaggcagccagcttttggcagacagtacagaaaagtaaatatatccttagacatccattgataaaggctgagtgattgagagaaaaactgcctttaaagacagaaaaataagctatcagaagtgaggaagagagatctaatgaaagaatcagacagggtacaaagaagagaacccagattggaagataattttttttctgaggaaaaaatggagataatcatgattaaaaataatcattgcctttataaagacctactcttactctgtggaaaccaggatttgtagatcctttatcgttgtttagctgggatactagtcctagaatatcaagccaatgtgctttcattcttggcaatccctgcgaccacatgaaagcactggggttctctgggaaaccgacttgggaaaggagttgtgagtgtgggatgtttagtaaggagagccctaggatccgccctaaggaagggagcttgggctgacctctcaagtcctccgcagctagactggcccttcagtgctgtgccagatgaccaggcctttatattcctatacttatcagtcatcagatgtgggaagaagtgtgagcttgggtgagcagctcagcagctgagccaatcctggaagggggtgacagctgcaggttgtgtactcaccatactcccagtgcctggggaacaagtcagttcttggaggggatctggcagcacatcctggtgttgagcacatgctatcccaggctcctgctgcagatgctgcccgggccccgcctgtatgctcagaccctcaatgccagcagtcctcctgatacagtttggctctgtgtccccacccaaatctcatgttgaattgtaatccccatgtgttggacgaagtgcctggtgggaggtgactgaatcataggggtggacttcccccttgttgttcttgtgatagtgagttctcacaagatctggttgtacaaaaatgtgtagcacctcccccttcagtctctgtcctgccacaatgtgaagaaggtgcttgcttcccccttcacccttctgccatgactgtaagcttcctgaggcctcccagtcatgcttcctgtatagcctgcagaactgtgagtcaattaaacctctttccttctaaaattacctagtctctaatagttttttttttttcttttgagatattgtctcactctgttacccagactggagtgcagtgttgtgatcttggctcactgcaacctcctcctcccaggttcaagtgattctcctgcctcagcctcccaagtagctgggactacaggcatgcaccatcatgcctggctaatttttgtatattttttttagtagaggtggtgtttcaccatattggccaggctggtctcaaactcctgacctcatgatctgcccacctcagcctcccaaagtgctgggattacaggcgtgacctggtagttctttataacagtcgaagaatggactaatacacctcccacggatggaatccacattgctgtgcctgctggcttttggctgaaccactgaagcagctttgctcataagtgagaacatttggaagtgccagggaatgaatgtctccctccctcccaccagcagcccttaatcactgactcttgggagttaataaagacccagctacctggcccctccataggctagttctgatgtatgttttccactattcctccagtttccacgggagattaagcgccagttacccactgcaggaactgtcttaatggcccaccctttgctgtccaccttcccctctatttctcactttcccactcccctacctctgttccctccccctcccaaataaactactcccaaataaaatctttgtctaaggatctacttctgggagaagccaaactaaacagttcccatactaaatatatatatatgtgtgtctagtagacacagatcacagagtttctgctattaaaaaaaaaacaatgcgtagagattaatgccaccaggaagaagaaggatataatatagtgaaatcctttcgaagaagaaaaaggaaatagaaaacctactgtttcaggctgctattttttaaaaccataaaatgtatggcttatatcaatagaaatctatttctcacaattctggagtctgggaagtctaagatcaaggtggcagtagatttggtctctggtgaaggtctgctccctcattcatagatggcaccttctcactgtgttctctcatggtggaagaggcaagctagctctctgggttcccttttataaggacactaatgccattcatgcaggctatgtcctcactacctcatcaccttcccaaagccctacctcctaacacaatcatcgcagggattagaattccaacataggaatttggaggagacacaagcattcagactgtagcacccactctgtataatgcactggagtatgaaagaaagagtggaagaaattgtagacacaagtcctcaccttccccttctcaagatagaagtctgtagcatgaaggacaactagaaacatccaggcaggcagtgttagagaaatacaattaacaacaacatatctccaacccagaaaacttcccacaaaggaagaagaggaagaaaacaatttcattattgaataaacattgaaccagaacgtggtacacatcacaggcgacccactaagaaattgtgaagacagaaagaagtctcacctttttatacagccaagcagatacagagtgttacatacatgttctcaaaataaacaacacctacgcctccataagaggacttggcagcatgatttgtcacacatggctcatcctagattcactgagtaactgcagtggccatctgtgtttcccaattggctttattcaaaggaaaaataaacttcttatatcctgatgatagaaggtagtttgggatcaagacacctgccaaagtgacagagaatttacaatgacaagttttctaaagcaaatgctctaagaaaaaggaggtctcttcccttattttcaacagaaacaatgacacttttttttttttttttttttgagatggagtcttgctcttgtcgcccaggctgagtgcaacagcacgatctcagctcactgcaatctccacctcccaagttcgggtgattctattgcctcagcctcctgagtagctgggattacaggcatctgccaccacacccagctaattttttctatttttagtagacacggtttcaccatgttggccaggctggtcccgaactcctgacctcaggtgatccacccgccttggccccccaaagtgctgggattacaggcccagcctctcatttttatttgtatttgcccttacagtacttggaaacccctacacttgagaggttttcatggaagacaatttaggtgatgctccagtgaacaaggtggagaattatggagacaagaagagaagggacaagggatccgatgaaactatcctgtgttgtctgttatacaactttagcttttcttgtaagatgaggagtcattacagagttttgcccagaggaacgataggatttggcttacatgttagagtcactcattattcataagtatctattagcaactctattcctgggactgttcttggtgctaaagaaggtacacaagaaacagagctttgttgtaaggttttttactctcctgatggggaaataacagggaaaagcagccactagtaacacaggtcatataggcagctgtcagtgtacagaaaaggcaagaagaaaagaatacagagaaaatggaagactaaggactgaaacagtcacagaacgcatcaaggggaagacagaatttgagctgggcattaaagggtggtagtagttggaagacagagaggaaaatagtataacttaagggtaaggaatgtctctgaatatactgaattggatttggacaggttgggaaaaaccagcaagattgcagaagtctgatgctgcaagaggcgaagggttactgataaggacaatgaacagatcatcatgtaactagctagtagaaacgttcccattctctgctctgatatcttcaactggagctgaacagagtggccatatatttgcataatggcctcctcccttgttactttttaccaattagctgggtttaacaagaagcaattatgacaattacttttaattacttctgctattccctcctcaccctattcttcctttcctacccctttgattaaaaactcaccctcattgttgtgtaaaactttaaataacttagaagctttgaacaaaatgccagtttactggaggatgaggaagggggcttcaagactgatgggaaccaaaattatgtatgatggttacttttatctagcaaactgactgggccatggggtagctgatattcagttaagtatttttcctggtgtttctgcgaaagtgttttggatgagattaacatttaagccaatggactaagtaaagcaattgccctccctagtgtcagtggacctcatcaaatcagctgaaggtctaaatagaaggaaaaagccaactctcccccaagtaggagggaatctctcctgcctgactgccttttgactgacatgggttttttcctgccttcagactcacactgatgcataggctcttcctgagtcttcggcctgccagcctttggattggtaccacaacagaggctctcctggttctcaggccttcagattcagactggaaccacaccatcagctctcctgggtctccagcctacccactcaccctgcagatattaagactgcccagcctctataattgcacgaaccgatttcttgtaataaatctctttctacatatatacatcctgttggttctgtttatctagaaaacactaatacagaaatgcatctgaaaatttccctcctcttgcttttgggatgtgggttgccaaggggttgagaacagtgaaagcaggagaaggctggaaaggtgtcataatactgggacttctaaaagcatttatgggcttccctcaggcccagagcagggcattacccactctcatagggttaataaatgtcggggggaggtcacaaaacatgagattcttctaagtagcggcctattcaccttgggacctaagggactgccactaaaaaagaaacagtctgtacagtaacaattgagtacagattggaagccacctgaccgtggcacagccctcagggaggagtgagacacacagctgaattcagcccttagacacacgcctaaagacatttccctataatagtcacaaacataaatacaatttctagtgaatgcttactcagttaacagatgctgtgctatgggccttgggtccattgtctcatgtaatctttgcaacaattctagaggtaaaaattactgtcttcacttttcagatgggaaaacagaggtctaatgaaatgtattagtcagggttttccagagaaacaggaaaatagaatgtgtgtgtgtatacatatatttataaacctctctctgtctcatatatatatgagacatatatggaaattatctcatacaactctggaagccaaaaagccccatcatatgccactgcaatttggagacgcaagaaagccagtggtgtagttcaatccaagtccataggcctgagaaccagaggagccaatggtataccaggctaagtccaaagctacaagaaccaggagctctgatgtccttggttcttgagacagaagaaggtggatgttccaactcaaatagagagagcaaattagcccttcctctgcctcttcattctatttagagactcaaagtattgggtgatgtctgcccacactggtgagggcgattctgtaactcagcagatggattcaaatgttaacttcttcttgaaacccctcacagtcaacacagaaataatattttcccagctatctgggcatcccttagcccaggcaagctgacacatgaaattagccatcctgcaaagttaagagaagttacagctgaagagactgagggtccaagactaaaaatgtgttgtaggaattgaatgaactgttctcagaaatgtgtgtagccaaatgtctggcatgtgataagacctcaagaaatgaaattttttatgttcacattgtcatcattatcatcaccattattatattcttccttcactgtactttatcaactactaatacatttatctggctctaataaggctaaaatgctaaaggcatcactctgtatacgccctttaaattcaaagctacttaaaagtgtgtttgtcggccaggcacggtagctcacgcctgtaatcccagcactttgggatgctgaagcaggcagatcacgatgtcaggagttcaagagcagcctgatcaatatggtgaaaccccatctctactaaaaatatttttttttaattagccgggcatggtggcgtatgcctgtagtcccagctacttgggaggttgaggcagaaggatcacttgaacccaggaggcagaggttgcagtgagccaagatcgtccagcatgggtgacagaatgagactccgtctcaaaaaaataataagtaaaaataaaactgtgtttgttaaaactgtgccacaggtgtaagggatatttgagcttccttcttagttcctttaagaaacaaagatcaccctctagtctgaaacccaattcaaaacctttcaccaggctgggcatggtggctcacacctgtaatcccagcactttgggaggctgaggcaggcagatcacttgaggtcaggaattcgagaccagcctgaccaacatggtgaaaccccgtctctgctaaaaatacaaaaattagccagcatggtggcatgcacctgtaatcccagctactcgggaggctgaggcaggagaatcgcttgaacccgggtggcagaggttgcagtgagtggagatcccgccactgcactccagcctggacaacagaacaagactccatctcaaaaaaaaaaaaaaaaaaaaaaaaaaaaaagaattttcaccactgtctcccaggtgtccatgggtctttcctgtttcccaaacatcttctgacggcagcagcaaccaagctcaaggccacccattggcaacttcagtagggtttttccagcagcatctttatattctctaacccagaacttactcaaggtatatagtaggtactaaataattacttgcttaatgaaaactattttcaagctttctcttcaatcttgtctctccatgcattcaaaagtaatttagagctaaccatgtggctatcatgcttacgttgttttaattgtattttatgtttgacatctacccagaagaaatagagaaatatcctttaagttaatgtttctgccctgtgcatcatgaacaatgattacgttggaatcatttgctagtcaatgccattaattacttttccttttgtggtgactgtcatggtcctgttgctattttcctctccagacagtagaattatactgaaatatatctattagtcattacacatatatcttgcaggttgcttattcctgataccactttagtcctgattaaatacaacatgaactttggctttggacaaaggaagaggcaaatctagcagtgttccttgaatttatgaggctgcaaaatgagttactgtgatttcagagagcacggttaccatattagggaagaagctcacgtgaccttctcctctggcactggtgatcccaatggattcacagccagggcttggcctggcttcttctgcagagactgtgataatgtgccctgggacctggattttatatgaatgtagcatctgctctttgagcactggagagaaaagagggaattaatctacatttcttgatcctttattatcagactcatctcaatactaagcattgtacaaccaacctaattcaaacttatacaggtgaacaagttttatttattttttttaagacagggtctcgctctgttacccaggctcgagtgcagtgtgagaccttggctcactgcaacctctgcctcccaggttcaagagattctcctgcctcagcctcctgagtagctgagattacgggtgcccaccaacacactggctaatttttgtatttttagtagcacagagtttcaccatgttgcctaggctggtttcaaacttcggacctcaagcaatccacccgcttcagcctaccacagtgctgggattacaggggtgagccactgtgcccagcccatgaaaagttttattaaacatgttttagtaaatctgtttagatgaggaagctaaagttctgataagctaaataacttgaccaagaccacacagctgtgactaagaagtagagtaggttttgaacccagggttatgacaccaaagctccactacttctctgcgtatggccaagaagcctagagatgagatacgtgttaaacaatgagctgaaatttataaggacagtggtgcagctggaacggcgcaacagtgagaggaatctcaggaccaatcattaaggttatgagatctctttcttccgtgagtctcagaaaccacagagtcacaacagaaaaagcagatgatgtgattgacaacaatctagagtctgcgtgataggtgcagtgaaattcccaaggtgagaaatttggggcaaaaaatgagggcatggaggagtcctgtctgtgtgcagaggtaaatcacaccaggaggcagtggagacagactggaacattgtggaaggatctgcagtctaaggaagtgcggctggatgagggtggggagacagggaaaagataatacaagcaatactctaggaaaaggatgggcgatgttgttaacagggggcaaatttcagagttggaaatagtacaggcagagtccaaagcctacctcattctctaataagctgctcctctctagttatcaaggtagaatgatctgataaactaattgatgctataagtgtcatgggatatgctgccagggttatctacttcagcagtagcctcttcccagacaaagcaaaggtactcgaaagaggattctttagtgatagaatgacacacactaccaacagacactaagggttgtacttgtaagagctcgagtttctggataaggatgttcttcagtacttccctcaaatcctattacacaagcaaggtctaatctgccttagaaagcctcagcgctgcctgaggctcagctcttgaatgggttttgtagaaaggttgtagctctcaatttgagttcctcttgccacagcctacagtctccaggcatcctcccccgctttatcctccaccctcaccctaggctgctctccctttctcatctctctccctcactcatctctagccaccctggtctcttctctgtttctccaatattcctttcttcccaaaagactttgcacatgcgattctttctgtctggaaacacttccatcgacttttcaagagtctgctgcttctcactgttcaagtctctgcctgaaggtcaccacctcaagaaggcttacccaaccacctgacctcaaacaggtcctgaacccactacccacagtgcttatcccagagggtactttgtgtatttcttaccctccagctctcccaccagaagcgggggctccttaaagcagggactgctggtatgtgctcagcccctcacacagcctcaccacagtaggggacctgataaatcataatgggctaaatgagtgccggagtgatccatgagtaagcatctgagagaggcagtggaaggatgggggggcaagaggaagtggttccatcagctgccacttactctttttctcacagtataccttctcttgtcaatttttgttttgtttctttgagacaaggtcttgctctgtcacccaggctagagtgcagtggcgcaatcttggctcactacaggctcaacctcccaggctcaagcaattctgcctcaggccctcaaatagctgggacaaaaggcacgcacctccatgtctgactaatttttgtattttttgtagagacggggtcttgacttgttgcccaggctggtctcgaactcctaggctcaagcaatctggccacctcagtctcccaaagtgctgggattacaggttgagccaccacacccagcctgtttgtcagttctaataaaatttccctgtgtggaagacttgtaggggaggagacaagagggaatttctgattttcattgagtcccactgtgccctcgggatgatcctgggtcgtacacagcccagagcccaactctggccataggaacattgttataggctgaactattaacttcccaaattcacatgttgaagccctaacctccagaacccaagaatgtgattgcatctggagatatggcctggaaagagatgattaggttaaagaggttggtagggtgggacctaacaaaatctaagtggagtttgtataagaaaaggatatttggtggtcgggtgcggtggctcatgcctgtaatcccagcactttgggaggccgaggagggcagatcacgaggtcaggagatcgagaccatcctggctaacacagtgaaaccctgtctctactaaaaaatacaaaaaaaaaaaaaaaaattagcccagcatggtggcgtgtgcctgtagtcccagctactcgggacgctgaggcaggagaatcatttgaacccgggaggcagaggttgcagtgagccgagatcgtgccactgcactccagcctggtcgacagagcaagactccatctttaaaaaaaaaaaaaaaggatatttgggcacacagagaaacactaggaatgtgcacacatggagagaagaccacacgagttcacagcaaggaggtggcccagctacaaggcaaggagagaggccttagaaaaaaacaatcccactggccttgattttggagttccagcctcctgaactgtgagaaaataaatttctgttgttcaagccacccagtctgtagcatttttttatcgcagcctgaacagactaatacaaacattaatagtcttattacatcatggataacttcaatagacaatggtaagttggacagagcagacctccatccagggaaatgctgtgggcgggggtaaaggacacagattttgcaatgatatcccaaagccaccacttgctcccttgggcatgttacttaacctgtgaatccatatcctcttctatgaaatgacactcatggaaggatcacaggagataaggtttataaaagcatttttcatagttcttaaaggtcactgctcaacacatgccaatgccctgccctcatctttctgtccaactcggttacataggagtagtaaggccctggttctaagagaattggaaaatgccagatagattagtaaaaattattgagtgaaataaatgcatataagcctgagtgtgtgcacaaatgcatggatgaggttcctaacataaggcaggtgtggctgttctctgagcctattgtgtaagtgtaagcctgggatccattctaatgagtggttttgtgctataattgtagttggatagtctgactaacaccagaggccacaggtgaccctggtggaacatttggaagaaaaagccagaatttgatggagtacttcaccagtttccaaatgccaaatagaactaaaatcgtattaccggccaagtaaagaagaatccagctgaattattaagaacatgagtcattttgaggctccttggaattaaccatgtctctgagaattcacattcttttgtaaagatctcccttaaataactattttagtgttacctttccaaggagaagagacctcttaaaatcccttggttcctgttgagctgccagatcccgaggtgatcaaacaggacaacaagccaaactgaaagaaacaaccaggcctttattcatttaccacgagagtgaaggcaagagacaaacagaaaaaggaaggagggggaagaactagggttaaaaagtactgggtcagagtacccaatggagagaagagtcttagtcaaggtccccctataaggaacatcttggtggatgtacctgaaaagtgcccccgcctctagcagggctatagataaggaggaccccaaatagagatgtcttggctatgaatgcaaatatctgtaagtatgagcagtaagtgtggagggacttgaatccttgactgcacctccctcctccagacactacgatgtggggaggacaactctctcccatgagacctgccaggaaaagccttgcaattgcctttggtcagacctgagagatcatacctaggacttcaacctggagctggactcttcactattgataagatctccaccacacgttggtctgaagccatgggtcttaaccttagagtctggaattactagagaatctgtttaaaactataaatcctctcctctgaaaatgcacataaatatatttggcataaaatttcatgaaatttataaaaccatgaagtctacctgtaaacccaaggttaagaaatccatcactacagaagaacagattactctgtcagggatttgaataatatataggcccatgtggctttactgtgggatgtcactagaggatgaaatcaggtaacctggccagtgactgcagaaccactctgatagaaccccagaactggcttcacctgtgatatggtttaaccaccatgctcatttctaaaggtgaacgctggtatcgtgtgtgtgtgtgtgtgtgtgtgtgtgtgtgtgtgtgtgtgtgtgtaaaacaactgattgaataagtttaacaacccagcaagcacatatagcttgtgagactcaagaaatacttaagttggtgctcaataattgtattagtttgcttaggttgccattacaaaatgccacagactgggtggcttagacaacagaaatttatttatcaccattctagaggctgagaagtccaagattaaggtgccagcaagatacgtttcattctgaggcctcttctcttggcttgtacacagccaccttctccctatattcttatatgacagagaaagagagagctttgctttgctctgtctctttttttttttttttttcttgagacagagtctcggcctgtcacccaggctggagtgcagtggcacaatctcggctcactgcaacctctgcctccggattcaaacgattctcttgcctcagactccagagtatgtgggattacaggcgtgtaccaccatacccatctaattttttgtattttagtagagatacggtttcaccatgttgcccaggttggtctttaacccctgagctcaggcaatctgcctgcctcagcctcccacagtgctaggattacaggcataagccaccatgcccagctggtctctctctcttcttataaggacactaattctatcagcttaggccccacccttatgacctcacctaaccttgccacctaaaaatccgatcttcaaatacaatcacaatggaagttaaggcttcaacatacaaattttggagggacacagttcagttcatcgtcatatttaaaccagttcttccttctcgacctcaaaaggatttctcccactaaattgaaagtctctttgcactactggagttgagccaaccatgaaacaatgacaagttacttccagagatacccaatatccttggattatgttgaacatttagcatagaacctacctattcttaataatgcttctttctgcaaaggaaaaataaaattttttcaaaaattttacagatttttctgctgggctatatatattgatggggagtaaccacaaattcacaccccactgtgagattagattatattcccactctatttcagcaaggttacaaaccctactgaaagcatagtggccatgcagggcagaaacagatgtaatatatacttcaccctcaaaatgtttcatggagggcatgtagtcaccattgacttttttggctcaaggtaagatcttggtggaaaactgccaagccactgcccttttaatacacatggcttatatatatcatcatttcagaagcatttatattaaaataaatgagatgcattaaaatctgtgtgctaccctttaacaaaatttttacaaatatcaagctctcctacttcttgaacccaaattagcactagcaaggcctcatcctcctccagagggtgagggttgtcagtgccaaaatgtcccttgtattagttcattctctcgctgctaataaagacatacctgagactggataatttataaagaaaaacaggtttaatggactcacagttccacatggcttgggaggcctcacaatcatggtggaaggcaaggagcagcaaaagcacatcttacatggatggtgggaggcaaagagggattgtgtagggaaactccccttcataaagccatcagatctcatgacacttattcactatcataagaacagcattgtaaagacctgcccctatgattcaatcacctcgcaccaggtccctcccacaacacatgggaattatgggagctacaaatcaaaatgagatttgggtggggacacagccaaaccatatcatccctgaacaatacagcttctccacttctggaaaattcatgttcttggggtgcttaaaacactatgattcactgcattttgcctgaaaggtgactgaaacactcataagacattatcagaaaaaaactagttcaatttggaaaaataatacatggattcagttatagaaactcaaaggaatacatgaattggactgagaaaacagtcacagtaagagaccctcctctagctcagcagctaagatttctctgtttccatgtcattagctaacatgctctaaataattttaattgttcatatagatcagtaactgaagctttacaaagtcctacatgaaaggttgtttttccataagtaagtgcaggcttcaaattaaaaattcattcaaagttaccagacgaattgcccaccgaagcaaataattgaaattatcagagtatcaaataaaaatgtttgtttacttttttttttaatctataaaatgttgctaacaaagtaatttttagttttcatttttaaactgtcagtgcttttttccagataccattcatccctgaaaaaaatcatattttggtctataattgcaaaaattatttttcatgggtagtttcatatttctaaatgtcacttcattttaatttttgtaattctatcaatttcatgtctggagttcttccctgccacctcagctgagctcacatgcccactggtaggtgctgtaggatttcctctcacaattatagccttaagttattaatgtttgagacaggaaaagagagaggaggattcttataaacggctctgagcatctactgaggatgagaagactttaactaaaatcaacttcgctcttgagaacacatttctctttgacgactgaaacacctaaccttgtcattcaagttaaactcaattgctaccattttaaaatgtagcgactcagtattaaactcagtcgattcaagcctctgttcctcagctcctttctccctgggaatggtttttactggtgggtgggtttgcagcactgtcctggcatcaggtgtaagaggcaactggagttggcatccacaactgacttcctccaaacccaatcgagtttgccttaggttcactagctctgtcccagaatgctgcaacccacctccagtaggaaaagaggacatagaatgaagggattgggaaaatctaagtggcttttctatgctctacctcatacacagtgagatctagtgtattagtccattttcatactgccatgaataaataccagagactgggtaatttataaagaaaaagaggtttaatggactcacagttccacatggctggggaggcctcacaatcatggctgaagacgaaggaggagcaaagggacatcttacatggcaacaggcaagacagtgtgtgcaaaagaactgtcctttataaaaccatcagatctcatgagacttattcactatcacgagaacatcatgggaaaaaaccagcccccatgattcaattacctcccaccacgtccctcccacaacccataaggactatgggggctacagttcaagatgagatttgggtgggaacacagccgaacatatcatctagattctgtgagactctctcagctcattacctggacaccttacctatacagtctccaatgccatgttggacattcttgggtcaagaggaacaaagtgtggtcaacaaggctggggaaagaggaatcttcagtacacactagcatccaaaccatgtctactttctctccaaatctcctcctcactcccgctggatagacttttatctcctttctttcactaaggtataatttacatatagtgtatgaacaattcgattagttttaacaaatgtatacacttttgtaacctatagtcttatcaagatatagaatattctatcacaccagaaatttttcttatgcttcccaaccccccatcaattaccactcctaggcaaacacttttctgatttctatcatcacagattaattttgtgtgtgccagaatttcatataaacgaaatcatgcagggtgtgctatttggggtctggcttcatctactcagcatcatgtttttgagatgcatgcatgtggcactattagtaatttactccattatattgcattgtatgaaatttttttccaatttctcccttccatctttattgattctcaagattttgcacagaaaactctttggggtctagaagagcagtaattgcatcacagtttccaagacttcaagtttcaaaagcaaatcattaaaaaaaaaaatacagctcctgatttgagttagatacagggacaaaaaagtagcacatacttgaaggttacatggtctacaaatggtggcaatattttccttgggagagtggttctgttggtatgtattttttaaatactcaaaaggctcaacctcaagcagtaataaacacaagcaaaagtgatttaacccttaaataactcagaaaaacctctctgtacatacaagtgaaacaatatgtaacactttcactcaaaaaaaattataataataaaggatttgttcatatatgtagctgaaatctgctgttccggcccacatgtccccagtaaagaagggagtcacagacaacaggtgactactgtggttttcttacagcctttttgtactgggacactatcaccaccacaaatttatccctcttgttatatttttaaatttttaaaaaattttttcttccttttttgtgttttgttttgttttacagcatgccaaatgcttcacatatgtgatggccttcaacaatctctccttaagtttttctttgcctgaatattctggaagtaaaagcacattaaagcaagtaggagatgtaggtaacctttctgtgtctgggccatttttggctagaatcatcactaattttcctggtcctcccacaggtgctctgtctgtgcccactgtaaactgcaagaagagtcttttctgttcatccataaatgaatgatttcccagaactccctcatcagaacggagtccctggtatagccaccgtcatattccgtagtttcttctagtgcttggaaatctagattctggcttccacatataagcaattcaatttcttctggtctgagtaagtactttaagggagattcattggacaccgtatgaaaacttctccgaaaagccttgaactgtttttctactgattgagaatgtagtcagaataaagattgacaaatttcttcctgttttcatttgtaattggaattttatcaccattttcctttagagcatacatcattgggttaccaaaagatctgtctgtgatacctggaaagtgatcatcatgtcatcttccacattcccttcatactccaataaatcttttaaactctgatataaaactgggtgacagtctcccaagtgataaaaagttccttttttccccattaccttcctgtagacaaccatgggaaaatgtacacccagtatacagttattgtaaatagccagacccagtactatgccaatcagagtaaaccaaccctcagtttgaaaagatggattagccgggtgtggtggctcacgcctgtaatcccagcactttgggaggccgaggcagatggatcacgaagtcaggagatcgagaccatcctggttaacacagtgaaaccctgtctctactaaaaatacaaaaattagccgggtgtggtggtgcacacctgtagtcccagctacacaggaggctgaggcaggagaattgtgtgaacccgggaggtggagcttgcagtgagcagagatcatgccactgcactccagtctgggtgacagagcgagactccatctcaaaaaaaaaaaaaagaaaaagaaagaaaagaaaggaagatggattaaaccaaaacaattttgtaagttcatcgtacgtgaacataccaatatctggattgaagatttcctccacgaccagctgaaaaaattatttggaaacacctccctcaccttgttctccttcaaattccacatagaactgcttcaagtctgcaggattttccatagtgatcatctctagccggacaagtgcatcatctatgatatggtcacatctaacaatgagtctcaaatatggattcaactgctgtccttgaactaagctgtagagaacagtgattcttcgttcactgtacatgcgaattctattgtcataatataatcccaaattctttgtgacagcatacgctaaaaaggggtatgtcataaaagagaatttgttctgtttctactttgaaaacagtataatctttatgcatttctagaacctccttcagtggttcattaataaactcttcaaaagggataagggatttttgacaatccagggttttaacaccaagttcattttccagggggtccactcaaggacctttcttgtttcttctctcttcttccaaaagctcctgaagtgtcagctcactggactcagggatgggctcttcatcatcttcctcactgtgatttgtgtccacttcccctcccactaccatttgcatagtaaatcattttcaagcacttcgaagcagcaacaatggcatcatcatcattcaccagattttgactgttaaattcgttgcttatgactttgtaagtaataagttgctgaactgtctccatcattctccgaatctggtctgcattgtatttagaccacagtctgatcagctttccttgggctgcaaggggtagcttgctcattgctttgcaaaataatggcaaagccatttccagatattcaggactgtggagatttctgttctccattactataatgaacaaattcagataattaggatcttgagagtataccttgtgatacatcaagtcacattccacgttaggtgacaaatatacaagtgcattgagaaaggcaatttcaattttttcattagagagcaatctggtgtagacccttctaatggaatcagtatccacagacacatcatcagggcctaatttttgcaaattgttgtctccctgtgagctatcacctgtgcttgaggaagatgcttctgagtcttcttccatagcagcagcagaacatgcagcttttgccttttcattttcattcttctcttcatcctttgcttgaagagacttcagttcttccttggtgtgttgtttagctttccagaagctctctaccaatgcctcagcactagaaaaaactcttccaataacacagttaagggggaataatcctctctttctctacataattcagtaatttcatataccttctcttctgttaagtaagtcacatctttaaaatctgtatgaaaattttacagtttatctagtcacctgatagacatttagattattcccaattttttactactatgaataaaattgctataaatgtttacacacaaatatttttggacatatatttttatttatcttgggtaaattgatctactagcactatgtgtccctagataaggtgtaaacgtgctgggtcaaagggtagatgaatgtttcgctttattagaaactgccagttttccaaagtggttgtacttaagtctttttggagggtaactgctcttagtacacatcatcttctattctgttgtttaaaagataagttctacattctttatcctccaagcaatagctgctttaaagccccacatattttcttccctaaaaagttcagattttacaaatacaaaatgctatcgctctactaagaattataaaagcttattttagaacaaaaagccaaggatttgactctttgttcacactgtgttctttctggtctccccttcactgacagtctaagatttgtggcttagtttaaatggccaaagagctacagggtcacaagtggtgaagagaaacaaaaacacgagatcagattttaaaataatcagctagcaatttgggacaccaagcaatgcccaataaacttgccgaacaagtttattctaaaggtttgataacagccaatgaacagtgcaggaaaaatacgttgaccacggctggggacatttcatttactatttctgtggtatttccaacagagaaacaagagaatgaatttgtctttcagtcaagagctatcactatcaatgtatttctatgatgttaggagaaatcctgaatattgctataaacgttatccctctgtatacagattagagctattgggctattttttttttttttttttttttttgagacggagtttcgctcttgttgcccaggctggaatgcagtggcacgatctaggctcactgcaacctccaccttctgatttcaagcgattctcctgcctcagcctcccaagtagctgggatttcaggcatccaccaccacactcagctatttttgtatttttagtagagatggggtttcaccatgttggccaggctgatcccgaactcctgaccttgtgatccgcccacctcagcctcccgaagtgctgggattacaggcatgagccacagcgcccagcccaggctatgatttttatataggcaacaaaaatttcttttaaaaaaattccaaaagtacatatactagtcagttgcagttctcaaagaattatgactcccaaaaattcatgacctggtgtagctcttgccccttcaattgaagctgaataaagcaggttacttaataaatactagaattcagtggaggtgatgctttgcaactctggaactgagcctttagaagggctggcatccctgctttgttgccactaggagctctgcacagccatcgaagtacagctattcttccagaaggatgatgtgaggatgacacaaagagaaggagaggatgtgaaggagaatcggagtgcaagtgacagtgagaactgaggccccagacgtaatgatcccaagtcagtcatctgatgtggtccagtccagcatatatcacatggagcagaggcaagctggtcccactatgcaccttgtgaattcctgacccacagaatagcaaacaaataaaactgttattcttttaagctactaaacatagagggtgattttcatgtaacaatagaagtagtcttgtggggagtacctcataatcagttgactgaaaacgaaaatgttaggcctgatttacagatgcttctgtatgataatgcaagcatcactcaaaaacagacaactatagcaccacagccccacccaggtgtggctgtgagggacaataggaagtgaaattctccctgcaggtagagatctacactgatttatgagaagtagcttaatatttgactgattgggcagagtctgccggggcgggggttggggggagaaacatgattagaaaaaatgacaaaatagttattgagaaggggaatataaatggagttctctgaatgcccaccatgtaaaaatgttcagattccatgtgactgttcactgaagagctatctcagcagaggaggatcttattaataacatggacaagatgacctagcatgtggatatccatttggctcttttccacatcatcccacttcttgcccaacaacctcattaatcaattggtcacagtggcagggctgaagggtatacatgggctcagtaaggtggatccaatccagccactgctgagtgctcaatctgccagcagcagaggccagccctgaatctctgatgtagcctcactacctgagagaatcctctagtcacctggaggcatcatggaaggggcagtggtttgttcccactggaaaagacacttactctgcatgtaaatgtgccttccctgcctacaacgcttctgccaaaatcagtgcttgtagactcagagacggcctcattaattatcaaagtgtcacacacagccttgtttccaaaccaggagatcatattccatcaaataaaatatgacaataagctcatatgtatagtattgactagtcttaccatgctgccaatcagccaccagtctgaaaaaacaactgaataacctttgggaaacttagttatgacaccagcttagggacaacacttggcagggaagttatagctagttatatcatattacataataaggaattaaacttttagttattccgctaggaaagaacgatgaccaccaggaatgggcagaggaagaaggaaattataacaccagttaagcctgtctgtccagttataaaaacaaagactagcaattctggctattgtttttcttactttcatataaatacctgtgtatatattaaccaattatgttcctttcttccccttctctcattaagctagtattgatcatcagatgtgttaatagttggttagtcttttatctcagtattcaggttacaagatatcaaaggaaaagtgtgatgcagcttaaagggtaataacagtgctggagaggatgtggagaaataggaacgcttttacactgttggtgggactgtaaattagttcaaccattgtggaagactgtggcaattcctcaaggatctaaaactagaaataccatttgacccagcaatcccattactgggtatatacccaaaggattataaatcatgctgctataaagacacatgcacatgtatgttcattgcggcactattcacaacagcaaagacttggaaccaacccaaatgtccatcaatgatagactggattaagaaaatgtggcacttatacaccatggaatactatgcagccataaaaaaggatgtgttcatgtcctttgtagggacatggatgaagctggaaaccatcattctcagcaaactatcgcaaggacaaaaaaccaaacactgcatgttctcactcataggtgggaattgaacaatgagaacacttggatacaggaaagagaacatcacacaccggggactgtcatggggtagggggaggggggagggatagcattaggagatatacctaatgtaaatgacgagttaatgggtgcagcacaccagcgtggcacatgtatacatatgtaacaaacctgcacgttgtgcacatgtaccctagaacttaaagtataattaaaaaaaaaaagggtaataacatcacccagagatggattagatgacacatgagactttgtatccttttggggcaagaaggttagcaggtgttaggttgtttggggggtggttgcatcaagttagaaagttaaatatatgttaaaaaggtatatatggtgccaagttaacaatgggttgactacgtagttttatgcatgccaactggtctactagcactatgattcccagaattatcttctgggaaacctgagcaagatttggaaggcagaagtgaacggcagccattgactcttcaaagaccatcattgttagtgcaacaagggatagaagcagaagtgctggcagattccagccctcattcatgttttccctcctctgtatctagctcttcttcctgactgcaagctttgctgactgtgataggtaattttatgtgtcaactcagagggcattttgagatgaaattaacatttaaatcagtgaactattaggtaaagtagattgccttccacaatgtgggtgggcctcatccaatacgttaaaggcctgaactgaacaaaaagatcagcctccctgagcaagaggaacttctccaacagactgccttcagcctttatctgcaccatcagctctccaggatctcagacttgccagtccccctgcagattttagacttcccagccgtcgtaatcacgtgagccaattctatagatagaaagatgggtggatggatggatagatagatgataaacagatgatagacagatggagatagacagatagatagatgatatacagatagatgatatacggatagatgggtagatagataggcaggcaggcagatagatcctactggttctttctctctggagagcctgaacacacgggccaacaatctttccaggcccataaccagatgcaaaggcaacaacagggttcccaggctccttcccagtttcattcctcagctgctgcccctgccttcccacattcctttgtgaactctgcccttgtccacttgcactagcatttcaaaaggcacggttatagacatttctctgatcctccaacccctccttgtaaactatacttctccggccccttccataatggtataaggctttattactatgataaatcccttattctataaaactcgtaatggttctgctgtctttattgtaccatgactgatacaatatattaccattttgtgcaaaagaaattgtgctaacattctcagcataggcagtaaagcactcacactgtaaaatggttctcatttcttgtcccattcatccgctcattcattcactgaggaaacatttgctgaatacctaccatcggccaggtgctgttctaagacagcagacttaaaatacacaaagggctgtgatgtgaatatgatcagcatctagaactataaccactgaagggaaattgccaggaggagatttcagttcaatattaagaactttctgacaattaaaactgcctcaaaggaatggcctctctgttctaaggtagtaaaggcctagtactacagaaattacctagcaacttacttacttacttctgacacatcagaagccctgatgcatcagttagcagagtttgaatattcaccaggttcaattttatatttatatttgatgattccaatatattatatgctatctgtgagattttgagactctatattctgtctgtattctaaggtgactatgagatatagtaggattatatagtagtctcagaataataccaaaaagggaagagaacaggtgtcttttgtttaccatatgccaggcaatattcattagttgttttataatcctcccaaaactctaaaaagtaagtgttattatcccctctctatggataaagacactgaaattcagcaagttatagtgacttatccaaacatctcagccaccaatcagaagaaactgaaaactttctgaccccaaacctatgttttttcttatgctgtatcaccctcaagtttcagcatttttatgtaagaattagtatgggtcgggcacagtggctcacgcctgtaatcccagcactttggaagtcccagtcaggtggatcacctgaggtcaggagttcaagaccagcctgaccaacacggagaaaccccatctctattaaaaatacaaaattagccaagcatggtggcgcatccctgtaatcccagctactcgggaggcggaggttgcggtgagccgagatcgtgccattgctctccagcctgggcaacaagagtgaaactctgtctcaaaaaaaaaaaaaaaagaatatgattactattcataattattgtaagattattaactttcacataataaagcataattccccatttttcaggtcaaatcttaatgcatgcatatttcaatatatcttagaatatatattgtattaaatatattaagacaataacactacatcatttgtcaaatgttttgtatgttccaaccactccaaagtgctttacattctcaattcatcctcacaggagtcctgcaaatggagatattttttagccttatcctacagataagaacaatgaaaatcaaagaggctaagacatgtttctaaagttgatcagcaactagaaagtggcaaggctggaattccaattttgttctggttgactttgaagctccttttccatgttctgggtaccctggcttactctctcccttgggctggggcggggatggtagatttttcttaccatattttgcaagatgacttgctctttctcctatatcttccaagattatttgctgccttctccctctggttgtctccttaaacagcttcttgtttatttctataacagtttctactttcagccccatttaaaataaaaattaggaagactcaccccatcaagccatttcaatatgtggaattggttgagcaaataaaaaaaatttgagaatactgaagttgccatggatgacatattactaccattcgttgtaatttaggtgttgtaagctttttttgttttttccactttgctcaatcaagcactcctaacttgatggtcttgcttctagctatgattcaaatccacggaggatttcattttgactttaaactatagctgatttgctgtaggagatgcttaagacaaccagagatataaattgcctcatctaccgccaagggaaaaatgattgtatcttgtaatatgaacctcaggatagggacgagcttgttggctatatactcctgttaccaacatcagctacaaagaagaaaaatagaattgaggagaagatcatttgttttcagctcattacagggaaaggaaaactacgttagtatatatgattcatacataaagaggaacatatacataaacacacagtgggagagaagcaagctagcatttattaagtcttaatatataccaagagcttcaggtatcttaaacaaccctaagagatttggttatttccatattatgaaggaaagaattgcaaaaacaaaaaaatctgagtttataaacccctcctaaagtccagattttctgtaccatattctattgactttatgtacaatcttacataaattcctcttagaaattctgagatcgttgtatatcacttacctttaatatttcagaatgaaaataaagtcatgaatctctaaacgggacttcagattcatctgcagcctctaccaattgttccctcttctttagtttttcttaccctgtttacaagtgcccctatgtttaagtcttgacaaaaattgtttggaagctttgatgtttatattgaaagtgcatagaaaaaaaatttgtttctcccacttagaaagcattagaaaacttctagctacctggagatgacatctattgttatgaggagcccaaagcccatctcacttgatttgggggcaacatcttgccctcctgtggaaaatcaccctcctcctcgctggtggtgttgatggagttgtcatttaggatgcctcccctttcctgattcaggggcaataaactaggtcggattctccctgtccccaacaaggattcaaatatcgtgcagcaaacttcaaagacagaaaacatttgtagcagatttatcccaaaagtgatgctcacagacactgtccattattctcctcactctgcccacatgcttgtcccacttattgcttatttatttatctttttctttggttctgtgtgctatcccatatcctcccattacattcctttatttttctctccctgttattagctagaggtagcttctgttgccagcaaccaaagtgcctgagctgaccatccaaccattgataggatacgtagagccccagttagacatttacaagtcactgcctgggacaaattgtgacactgggctccctgggtctctctttcctggatgcttgtgtctccttccacctgtgtttacaggatgtgcactttcattatcaatttgccgtggtcagctaatcccttctgagatgataatgcatgataatagctaaagctgcatcaccaaaagagattttatttcagtaggaagcacaagaaaactagaaaatgtggccgggtgcagtggctcatgcctgtaatttcagaactttgggaggccaacgtgggtggatcacttgagatcagaagtttgagaccagcctaggcaacatggtaaaaccctgtctctaccgaaaaaaaatacaaaaattagccggatgtggtggcacacacctgtagtccaagctactcgggaagctgaggcaccataatcgcttgaacccagaaggcgcaggttgcagtgagccaagatccccccactgcactccagcctagattacagagtgaaaccctgtcttaaacaaaaacaaacaaacaaaaaagtagaaaatgtggcagacacagaagagtgagacactaatcgtggaattccacatatgctaagaaaagatgtacaataagtcatcctgtgtaaacagtgtcttccaagactctccacaattcatggaatttcccactcaaggactctgtgtcaatttttaatgaaccagttactgaacattgtacctaagaccatgacaacttatgctcagccattccatgctcttccatacccagtgcagacaaatttattggggtttaattcaaaatgtgcaaaaaagaaaaatttgcaaattgtttttaaaaaggtaccatctactctcactattaggagcaagttttactacagattgctcaaataataaattcctgggattgaggcccgtctacattaccttgtggtgcttctttttctctgtacacactcacagcgtaatcagagtaaactactgcaatgcataccatcttgcagatgtttcattatgttcttctatgagataggcttcttaaccaaggacaagagaaattgtcaattaatacctgtctcatttaatctgcaggtgaatagagggctcagacagctgtgtctcctcaggggcttctaattaaaaaggattaagaatatatatccctgccgagtttcccagatttctcaatacaatcactttcactccaagaacgttggctacagcactatcctataaataaataccagtcatattttgagaaagactcaaatcagataactagaattgcaagcatgaagtcagttctaaataggttctggaccctaaacactacagattcctactttccactttatcccaggcccctacctggaaaacgctccctcccctctgttcaattaaatcgtccatgtcctttgaggcacatgtcattccctccatgaaaggttctgtgacccactgacctcatggtacatccctctcctgggacccatgaatcccctgaaattgcaagagtctcttgaggcacttagcatagctggtcacacactctgacctcgaggcaaatcccaaggcttctctcctcctgtttagacaatctataaaaaatatccttggaccctgccagatggtccggggatattttgaagaacagaggtacaattagggcacagagctgacagggcacaggaagaagatgtttagctggaggaataaaaatgaggtgaatagtctgtttttaaaaagatttaaaaggattttcttctcttgtgtgtggcgtaggctataagtaaaatttatcaggtcaagatcagcatttggtgtaaccttgatctacctctagtctaagtctaaatttacagggatacagagagcccttgaagctgggcatgattcagactagcagcagggttggagtctccagagaaactaggtccataggtaataaagaattccttacacctgcagggttctgtacatggcatctatctaggatagaggctggaagctgaagggagattcagggagtcctgggttctgcttctggccgaatcccatcctattaaaaatcatacaccaccttgtagagttagttgtctattttaaactctttctaattttactaatagattggaaaccccttgaagagaattatctccctagcaaccatttatcatgccttccacataataaatgtaaagtgctcaatggtttaaattagaaatgacttcttagtgaaaaaaaaaaatcacatggagaaaaagaaatatcctaaccaaaatatcctgcccaacaagtaaaacaggcaatttaatacagctatgcacagtagaactcgctagaataattgcttcccagactgcaggctccaaggggaaagaatcacctttgtgcccgccacagaggagatcaacaaataactatacttaactaattaactacaagtaactcaaaagttgtatttcaacaccccccatattagttttctattgctactgcaacaaattaccacaaacttagtggcttaaactgacacagaattattgtcctatagttctgtaagtctaaagtctaactggactaaaatctaggtgtcaggagggctaggtgtctaggtgtagggctaagttcattctgaaggctggaggggagaatctggttcctggcctttctcaactcctaaaggtggcctgcattcattggctcatagcccctccctccatcttcaaagccagcagggtagcatcttcaaatctctctctgtgactcagacacttttgcctccctcttaataaggacaattgtgattacaggcaaccacagtaatccaataaagcttcccatctcaagacccttaacttaatctcatctgcaaactcccttttgccatgttaggtaacatatttgcagatttcaggaattaggatgtggacatttgggggccattgttctacctaccaccactcccccaccacaaacacacacacacacacacacacacacacacacaaacacacaaatgactatgtggcaatgtcagacatttgtgaagctccccagtgctgatagaggatttttagaatttttcacattgctcccatcagagagataaaaacagagcaaaggaaagatgccactacccccaccttccaggggagagcgggtacatgtcttctcctctgtggccagcctctcccttgacttcttacactgcggctgcaactacaaagttcatcgccaactgaaatgtattaatcaaataatttttatatgtgataggtggttatgggaacctcttttataaaggaaacgaagttaaaaccagaggatcacttaaaattggggtgtacccacgtttattttgtcaagctccagcatctgtaatcccagatatttgggaggctgaggcaggaggactgcttgagcccaggagtttgaggctgcagtgagctatgatcatgccactgcactccagcctgggccacagaggaacactctgtctctaaaaatgaaaaagaatattttatcaagctcagcatcctgaatcccactcagaaggctactgcccccatgattccttagggctttagcctcagagtgaagcaatgtgggagccttccctagaaaaatcaaatttctatgatttggtttttgaacaaaataagtaacagaggagaagaaagaaaaacagagaagaccagaggagaagaggaaatgagagggaaaggaaagggaggagaggaggaaaaagagagatggtagataaaaattttcagggcatgcttccttaggaagcaaaaacttaggcaacgcttgcatccggttttcctgaggagtgcaacacactggaatctggagtggaggaaaggacagtagagtggcaaaacatagcaaatagaagggtatcctctcccagctgggcacatcttcaaaatcaagtatatcgtgcctatcacatggacagcctccagatgctacccggaaactagaaccacatggggagggaaggagagcaattgatctgtaggcttgttcttgtctcccattctcatcagtccaagttcatataagttgtgttacctggtcgctctgggaagccattgggaaaccagacatcactccctgaacacagtctttatctcagttctaaaggagtaggaaggccagagccctgtgagcctggtcttagctaactccaagttcaaactcaactgatccactgtctctagggatgcctttgcaggacagaccttgatggaagcatgggacctcaaacccccctggtctgtctttagctactacattcaaggccccaggaacttagttaagacaattcatccccagggaaactagctgggcttccatcttgcttcttcttggccacaggaccaagactctatcactttagtgctggatatgctgtggttctacatccatgagcacagtggaggtcacaacagccacattgcatagtcacagtgagctctgtgatgtgtaggaagtgagccaggggcacagctgcccagagagcccttgccacagaggaagttatggttcaagacttatgggaaagaaaagatgtaacatggggcactgagaggcacataaaattggacccgataccaaacccaagcacacagtaacttgtacataacaccaaattatgccatggcgatgaagtgctttgaatttcagtgggaaaaaaatctcccaaagctgaggggacaacgacagcatcagagaagcagcagctctcaagctaagctatgagggagagcttgtaataagtaattcccaaagatggaggttgcgtaatcacgctgtaatcacataagtgcatcaggtgctgtcctagaaactttccattaaatagtccatttaatcaaccgctctgtctgggagagttaaggatgtcattcccattcaactaataaggaagctgacaatacagtttagtggaggtcattcaaagtagcaaaaagagctaaagatgtggaagagttgacggctcattaaggagaaaagaaaaatatatttttaaggggtagataacccccagacccaggagggtcttcagagctgggctgtcgagttggaacattatttggtgacaatgaggcaagcagggaagggttatctactgaggaatgacttgtgtataaagtttcagaagataatcctgctggtggcatgaagaacgaaggcagagaccaatggaaagataatcagacttctgtcttccatgtagaagacagaggccctggtgaccctgaaaacttgaaagttgacaagatggcaggaagggtgaagacaaccccggggctcttccacgagcatatcacaggtggcccagtgcaactgaggggaactacattccctatttgtccttctgcactgattgtgcaaagctctcaccatgagacctggctcacccaaaggctatagactagtgtgaaactttcaactcgctgtgactctcccaaagacagagtgcatgagggctcaggaccagccctgccttaatcctcacatatcctttgtagtcgcagaatcatatcacttggcacttccatttccaagcagttctagaactttccaggtgcacttgctaattatcacagaccaccgggtgctgggagaagcagctacggtgatcacagccatgagcagagcacagttgggcccaaaactagtggctgcatgaaaatgaaatgcagaagacctgtttctttgcaatatgttattatattcaccagataaacatgaagctcatgaattatctttcattcggtaagattagcaactcttaggaaatgatttcctacctgggatgagaaaaaatctaatttattataaatgaaatatgcaaccctatatgcaaacacttataggagatgggtttgtatgagctttgtgctgttacagaaagctaaatttccctggagactctgaaaaggttatcacacgtggtttcttactgtcagcctatgggcgaggcagggtctgtgaggaatggtctcaagcaacagcctctcttaggagccagtaaactgcactctctggagtctgctccccacctgccctcatgcccttcttcccctcctcagcaatcacagttccaaatcagttcctctcacttccttcaagtcttgcccctcacctccatttgagaattcaaagtagagtttagatcttttacaggtctgctggagaaattggctctgaaaacatgacttaaattagagcttaagcaaccagagaaaaatattcaagacctagagagaatttcaggagaacatttatacatatcctgttatagtataataggtggaatggtggtccccaaaaatagggtcacgtgtggtggctcatgccagtagtcccagcattttaggaagccaacgtgagaggatcatttgagcccaggaattcaagaccaacctgggcaacacagcaagaccccatctctacaaaaaaaaaaaaaaaactagctgaatgtgatgctgcatgcttatagtactagctgctagggaggctgaggcaggaggatctcttgagcccaaaagttcgagcctacactgagctatggtcacaccactgcactccagcttgggtgacagagggaaaccgtgtctcaaaaaaatgaataaaaatgaaaaagatacgttcccatcctaattcccaaaacctttaaatgttaatttattggggagaagtatgtttgcagttgtgattaagaatcttgagataagatgatcctggataattaggtgggccctaacttcaatgacaagtgtccttataaacaaagggcaaagggaaatttgagacagaagaggggaagacacagagaataggaggaagcaatgtaaccatggaggtggagattggagagatgcaaccacacacccaagaatgccgacagcaaccagaagccagaggggcaatggatggaatatcttctggagcctctagaaggagtatagccctgaccctgacaacaaccccatttcagactcctggcctccagaactctgagagaataagtttctgttttaagctacataatttgtgataatttgtgacagaaaccacagaagacaaatacacctggttttaagcagacaacttaaaccattgttaatcatttcttcttccactgcctgccgtgccatatacacaggcctatacacattaacaacactaccgccaataccatcatcttctgaaaagttttatttgcatgtcgctctgcagataataacccttcagtgccagcagaagactcagtatgggattcttgttgaaattggtgggaagagaggactggggattagtgggagctgtcgggagctaccttgagaccacagagggacatcaggctgagatcagaatcagcacagaaaagagcagaactgaaaacagagacatcaaggcaacaccccaaaacacccctggaacccccgagcttttcagttaagtgagataatatgtccttgctttattaatttgagtttattgacctttttttcacttgcaactgacttgattcaggacacaaagcaacgcagaccccaagaacataagcaatgcctgaggttttctgtgagaacagcctgaaagccagtatctatttgagtgatgactctcatcggtttttggttttaaagttagtccaagagaaagtgaaagaacaaatcaaaacatgaattttatctgtggttcagttttctatgatatctccccacccagtcctggctactgtggctttgagtcacccatcttttcagttcaaagttggtaattcaatcttgcctcctatcagcatctctagccaatcctccagccttcagggaaatggtgcacaaagtaatagctttgttgacatgggaaaagaggagcagaacgtaccaaacatgacgttaactaggtaaagacattgcttcatgtcctgctggaaacaatggtcaagttacattcctcttatctggagccagaatccgtccaagctgttagcaaagatactcaatgtttgtgatatgtatggcactttatagcttatgaagtgctttctttttacatttatttttatttttcaataaaaatggggtctcactatgttgccaaagctggtctcgaattcctgggctcaagcaatcctcccacctcagcctcccaaagtgctgggatgacaggcctgagccatcgctcatagccaaaatgctttctcatctattttctcatttaattttctctacctccagccttctaatgataggcaaggacagaatggtaccctggcctgctgcagatgaggaaactgaggctcagtaaagttgagtggtttgttctaggccaaagagctagtgactctaaaaacaagacccatgcaatcatgatgtaacaatgaatctaaggaatacttcctttgcctcaataagaacaatgaagctttgcatcccctccactatctcccaagtcactaaacaaaggcctgggtaggcttttcttttttgacttggctgactactgtggtagatgaagaaagaaataagtctattgcatgattccagagctgagaaagccctatgtccccaactacctcctccccaccccagctcccactacatctgaaactggagcaagagagccttttattccaccattagagatggactgaaaaaaaaaaaaaaactgtgtaacatcaagcaggaattcaccattaactgtgaaatcaccccacaatcatccctttcacctacatttccaatgacttctcaccagccttccattttactcttccatcaccccctgcccccaaatgcaaggcttcctaagagcagacttgaatgtgagtgagggcagcaatgaaaactgcagggcactgggcattgggagtatgtgtgtgtacaggggtggacagccagggtagagagaggtgggctgggaaaaaggagggaataatccaggtaccctttactgcaccagctgccacttacacgtcatcttatttgatgctgatgacccagctcctttatggaaggcattatttccttccctgtgtaaatgaagaaatcaaagctctggaaagtaaaataagttgctcagttcaagagaaaatgaccaacatgactatgtatgcacgattacgtaagagaagactgtgatgcccaccttgctaggagactgtgtctcctttggtggctttgaagaagcaagttgccatgttgtgaactgtctatggagtgggcacgtgtcagtggcccttggctgatagtaagaaactgaagcccacaattcaacagcctgccaggaactgaattctgccaataatcatgcatccttggaagcaaatccttcccccgttgagccttagatgagaccatagtcctggtcaacaccttgattgcggttttacagaggatccagctaagccatgcctggactcctgtcccatagagtttatgaaatgtgttagtgttttcttggcatgatagaagaagctgaaaagatacgtatcagacaatacaggaagataagcataggaagtgaattttcaccaaggactactcaattctacagtattcccctggctttttggctcttgcttgcttttataaaatctgtcccacttgtttcttttcttgcaacaataataacagtccatgatcattaatcaatttcccttcattttaagccaacacagttgtggtaaaacaatgttttgcagttgaaggtgtacaaagtttgcaaccgtttaaaacacccttcatgagactaaaccaaaatggccaaggccccctttacctgtgcattttctaaaaacaaatcatctttagaagggcagcctgattagagcctacacatgcctctctcctcctgccactgcatcatcagatcggttctatgatgcttcaatcatagttctcagacctgatggaccatcaaaatcaccttaaaagcctgagagaggccaggcgcggtgactcatgcctgtaatcccagcacttcgggaggccaaggtgggcagatcacaaggtcgggagatcgagaccatcctagctaacatggtgaaatctgtctctactaaaaatacaaaaaattagctgggcgtggtggcaggagcctgtagtcccagctactcaggaggctgaggcaggagaatggcgtgaacccgggaggcggagcttgcagtgagcggagatcgcaccactgaactccagcctgggcaacaaaaaaaaagcctgagagaaaaacacagattccaagtttaatgagactgctatacagcagtggttctcaaagtgtggtctcctggaacttgtggaaatgcaacttcccaggtcttaccccaaaactcctaaaacagacactctcggggtagagccagcaatctgcaattctgagactcactcatatttgagaacctctgtggtgtggaatattcacagcatagaaaatataagcaataatagtaatatgggagaaaaggcagtctgtaaagaaatgtattcaatctatttcaattttttagggaaaaaacctcctagaaatctataaacaaaatatcaaaagtggttatttttggatgacggttttcatttttctttgtcatcttctatacacatagcttttctaaaataggtatgtattactttcaaaatcaaaacaagttaaaagaaaaacagaactgtgagattgaaaggcaattaatttaaagtatacggcacaaaatttaccattttgaatattgcattaagatattcaaaaattttttcccttttcatttcacacagaaatgcggaataattttccttacccctataataatagtggaagatagggcaaggggaaaaatgatgagttgctttgacttcatagaaatgcaaatttctctcgtgaattcacaggttaaaaactggagaatctggctgacgactattgtaattgtggtctctgtgtcttcagtgaaatcctcaaggtaatttttgtcagtttctgctccatgtcatttatcattactgacaatctacttcaataggtaaaatcaaaacttaaaggaatagaccggccgggagcagtggctcacacctgtaatcccagcactttgggaggccaaggcggatagctcacctgaggtcaggagttcgagactagcctgaccaacatggtgaaacctcgtctctactaaaaacacacacacacaaaaaagctgggggtggtggcatgcctgtagtcccagctacttcggagactgacgcacgagaatcacttgaacccgggagacagtggttgcagtgaggggagatcgcaccactgcactccagcctgggcgacacagtgagactctgtctcaaaaaaaaaaaaaagaaaagaaaaaaagaacaatagaacataggtctggctgcatttctcaactttaatgtgctcagcaattgcctagaaatctccccaagtatctagggatctcgttctaatacagattctgatctagcaggtgtggggtggtaaccaagatgctgcatttccaacaagctcccaggaatgccaaacgcccatgctgttggccctcagaccgccctttgaatggagcccacatgaaggtttcaagcccatcttgttgagtggttttcagcctataacaccaggtgaatggtttgctcatgtcttttgaacgggctgcacagtccctgttccctgaaggagcgtcggcaaaacagccaccagtggagatctattacctcggaagcaccttcccccaacagtcccctctcaggctatccacttacattttgtgtcccaaattggttccttccagtgggttgtctcgctgacttcaagaatgaagctgcagaccctcgcggtgagtgttacagttcttaaagatggtgcatccggagtttgttccttcagatgttcagatgtgtcccgagtttcttcctcccagtgggttcatcctctcgctgacttcaggagtgaagctgcagaccctcacggtgagtgttacagctcttaaaagtagtgctgacccaaagacccaaagagtgagcagcagcaagacttactgacaagagcgaaaatgcaaagcttccacaaggtggaagggaacccgagtgggttgcagccgctggctaggatagccagcttttattcccttatttggccccacccacatcctgctgattggtccattttacagagcgctgatcggtctgtttttacagagtgctgattggtgcatttacaaacctttagctagacataaagcacttattggtgcgtttttacagagtgctgattggtgcgtttacaaacctttagctagacacagagtgcccactggtgtttacaatcctttagctagacagaaaagttctccaagtccccacccgacccagaggcccagccagcttcacctctcaattttacttatggcaggcttatctttccaactcgtttgtaaatatatactacaaaggcaggaaaatgggcccacgatagtgtttttcacaaaaagtagtttctgacattggttaatgagtcacagtgaaaaatggaagatgctaatcttccaaaaagcataggccaggcacggggtgggggtcatgcctgtaatcccagcactttgggaggccaacgtgggaggatcacttgggcccaaaagtttgagaccagcctgggcaacacagcaagattcaatctctactaaaataaaaaaaaaataggcatatgcctgtagtcccagctactcaggaggtgaaggcaggaggatcacttgagcctgggagttcaaagttgcagtgaactatgatccctatctccaaaaataaataaataaataaaaggcataattataagttggcagaaataattatataataaattttttttttttggagacagtctctcgctctgttgcccatgctggagtgcagtggcacgatctcagctcactgcaacctctgcctccatggttcaagagattctcctgcctcaccgtccaagtagctaggactacaggcacatgccaccacgcccagctaatttattgtatttttagtagagacggggtttcaccatgttagccaggatggtctcgatctcctgaccttgtgatccgcccgcctcagcctcccaaagtgctgggattacaggtgtgagccactgcgcccagcctgtaataattaatatggtgatatctgtctttacaacaatcccacccatgaggttggtgatatttgtatcctatttttcgagatgagaaaatggaaggacaaagaattttaaaagcttgcccacttactggtagaggtagcaaagccaggacttgaacccaggaagtcaggccctccaaagtcttctatcattttatttacttgccttttttccccattcctgttcaactaatggctatgatttgtgtcaaaggtcttttcagaaccaaaagaaaagaaaagacaatattgtattaactgatattctgtctacttttactgtcaggtgagacagttgcttggaatagtgaatcagaatctgaacgtggtgcttctaagacaataaagacagggagaatcctaagctggcattcaaaaaaacgtcgcagatcacatcattccacatctcattgtgtaatctggacagctgaaccctcaacagattcagggactagttcaaggtcacacacgcagcgaaaaatgtagttgaaaccaatttagtaggagggcccctaccaacctcctcttgttagtttgaatagcctgcatgagaaggaaaagcagcagtaatatcaattagaaacaggaaagctcatctgcctcctaactccctaaagatctttcgggccctttaaaaaaaggtagtgtccaagacacaaataccaagtccactgaaggtctcactaaccaaattgtgtgatgaggcatttctgcagatgaatatttttttggagctctaaatcatctcatccttaaattaaataattcttccccccccacccccccgcctccacaaggtaatttagaataaagaagatagtgtttgtaacacacctttcttgcccccaacacacatgcaccttgatcccctcatctgtcgggctacaaagttccttttaaaaaatattttttctaattgataaaatttgcttttgctcattaactttcccagttaaaagccctggctagatgctttttaaagtaacacagatggagatacgggaaagcaaagatcagaaacattggtgaaagcactgaaatgtttcttttctaaaaagattcattagtgatcagacagaaaaaaaggaagaaaggaaggcgggagggagggatagacagagggagggaggaaggaacagagaaaaagaaagaaggaaggaaggaagggaaagagggagggagagagaaaaaagaaagaaggaaagaaagaaaacctaaatttcttttcagttgcttaacaaaagaacttctggaaagctatagtctccatgcagaaaatgattttagctatcaaatatttttctaaatgctctccagatttgacaatggatttttctaaactcccacattgccctctctggggccaggacaggctaaactgtgaaaatgaatggttgaggaaaagaatactgaactctgccatgtgactgttcaactgttaatctacacccaaaaatgaaagtccatttccatccttaaaaatagtaaaggggaaggaaaagtatcttttccatttggtccattttcttggaaagtttgttattaaaggaaacggtggccaggcgcggtggctcacgcctgtaatcccagcactttgggaggccgaaacaggcggatcacctgaggtcaggagttcgggaccaccctgaccaatgtggcaaaccccagtctctactaaaaatacaaaaattaaccagccgtggtggtgggtgcctgtgctcccaactactcgggagactgaggcagaagaatggcttgaatccaggaggtggaggttgcagtgagccaagatcgcgccattgcactccagcctgggcggcagagcaagactccgtctcaaaaagataaataaataaaataaaggaaacagttatttgtctgggaagaggtggataaatgttcaaagaatgtgaagaagagaaacatccccttcctgttatcacatctgagctgacttattgaaataataacaggagaaggaaataaaaaaaagggaaaggaaaggaggaaaggccagagaggagggaggaagagagagagagagagagagagagagagagagagagagagagagagagagagagaatgaaaataagaacgataattttgggacccagcaatatgcttgagtttgcgtttgactctaaaaacattcatagtgaaacagcggcctcctctggtcacaggcaggaaattcaagaacttctgtttcttaccaaagtcaattttaaactatgaaaatggatggattattacattggaaaagaactgtattcaacatttaccaaatctgccgttgtgcactaaaaccgtataaactagaaaactcaacccaaaatcagtgttctgagggtgatgagttccagcaaaaatcctatgagaaattagagttggataggatcttgctcacatttaatctattctccctcacagtgatcttccctagttaaattaagtaaaagttgaaaattatcctccagggtgaaacaattttcccaaaatggtcactactggtctgcttgtactccattcggagccagatagacctagatttgaatgctggattcatagagctgcataactttggaccaggacttgccctgtttttccatctgtaaaataggccccatagcacctctcagggcttctctgcagatgcagtgaaagcacacacaaagcactaagcatgtaggaaaaattttgacaacgtcagggccccttcctgttgctaccactgagtccaatatagctcgtagctcactgaattgtatgtctaatgtttgtgtatttttttttgttttactcatttataaaagcaaagatcgtctttataacttttattgcggtaaaacgtgatatttggtaagatataatttgccattctaaccatttgtaagtgtacatttcagtggcatcaattatattcacaatatcgtccaaccatcaccactatccatttccaaaactttttcatcactccaaatagaaactttgtatccgttaagaaataattcctcctcccctcctcctcctctcattgctggtaacttctaatctactttctatctctatgaatttgcctgttttatatatttcatgtaactaggattatgcaatatttgtccttttgtgtctggtttatatcacttaccataatatttttgagattcattcatgttgtagtgcgtccggaattggtggcttcttcgtctcactgacttcaagaatgaagcagcagacccccgcggtgagtgttacagttcttaaagatggtgtgtctggagtttgttccttctggtggtttcgtggtctcgctgacttcaggagcgaagctgcagaccttcacggtgagtgttacagctcttaaaggctgcacgtctggagtttcgttccttccggtgggttcatggtcttgctggcctcaggagtgaagctgcagaccttcgcggtgagtattacagctcataaaagcggcgcagacccaaaaagttagctgcagcaagatttattacaaacagcaaaagaacaaatcctccacagcatggaaaggaacctcagcggttcgggtggcctgcttttattccctcatttggtcccacccacatcctgctgattggcccattttacagagagctgattggtccgttctacagagagctgttcggtctgttttgaccgagtgctgattggtgcgcttacaaatctttaactagacacagagtgctgattggtgcgtttacaatcctttagctagacacaaaagttccccaagtccccacccgattagccagacacagagcaatgattggtgcgtttacaaacctttagctagacacaagtgctgattggtgcatttacaatccttcagctagacggaaaagttctccaagtccccaccccgcctacaagcccagccggcttcacctctctctggcactcccatgggtctttgcggcacctagcctgggcactcccgcagcccggacggagctcgttccggatcaagcccagcggacacctgccggccgcgccaagcgcagagcccgccgagcccgcgcccacctggaaccgtgccggcctgcgagcgccgtgcgcagccccggctcccgcccgcgcctcttcctccacacctccccgccagcagagggagccggctctggcctcggccagccccagagaggggcccccacagcgaagcagcggggtgaagggctcttggagcagggacagagcggaggccaaggccgaggaggcgccaagagcgagcgagggctgctagcagttgccacctctcagtagcatgcatcaaaactttattacatggggtgcagtggttcacgcctgtaatcctagcactttgggaggccgaggcgggcgaatcacctgaggtcaggagttcaagaccagcctggccagcatggtgaaaccccgtctctaccaaaaatacaaaaatcagtcaggtgtggtgggccacacctgtaatcccaggtacttgggaggctgaaacaggagaatcgctgaacctgggaggcagaggttgcagtgagctccagcctgggcgacagagcaagaccctgtctcagaaaaaaaaaaaaaaaactttattcctttttcttgctgaataatacttccttacatagatatacagtttgtttagccgttcatctgttgacagacactgagtaattaccaccttttggctattgtgaataataagcattgttgcacaagtaactattcaggtccctgctttcggttcttttgtatgtatacccagagcatacggtacattccatgtttcattttttttcatttttttaatagagtctccctatcttgcacaagctggtctccaactcctggattgaagcaatcctcttctcagcctcccaagtagtttgtattaccgacatgagctaccacacccagctatgcttaatgtatttgtgtgtgtgtatatatatatttttttttatttattttttttttttggaaccaccaccatagtctattccacatcaggtgtaccattttacattcccacaagcaagccacaagggttccaatttccccacacccttgccaacagttgctgacgggatttttcattgtgcaaaactgaaactctgtatccattaaacaactttgttttccttccccctacccttggcaaccaccttttcctcactccaaacacaaacttcctacccattaagcagtaactcctcctttcctctctcccagctcctggtaactttcaatctactttgtttctatgagttcggctactttagatacctcttgtcagtggaatcatacagtgtttgtctttttatgactggctggcttcacttagcataatttcctcaaggttcctccaagttgtcatatgtaacagggttttttttctttttaaaagctgaataatatgcctttgtatgtacattgcatttcctttatccattcttccatcaatggacatttgggttgcttctacctcttggctactgtgaataattctgcaatgaacattggtttgaaaatatctcttcaagatcctgctttcaattcttttggctatatacccagaagtgaagttgctaggttatatgataaatctatttttaagtttttgaggaatctccatattgttctccatggcagcctgtaccattttaccttcctaccaacagcacacaagggttccagtttccccacatcctctccaacacttgttattttgtgttttttgatagtggccatactaatatgggtatgaggtgacatttcattgtagttttgatttgcacttctctaatgattagtgatgctgagcatcttttcatatgcttggtggccatttggacaccatccctggagaaatttatattcaagtaccttgcccagtttttagttttttgttgttgagttgtagtagctctttatatattctgggtattaatcccttgtcagatatatgatttgcaaatattttctcccattctgtagcttagcttttcactttgctgactctttcctttgatgtgcacaagtttttaagtttgatgtagtcccatctgtttgtttttgcttttgttgccaagctttttgtgtcatgtataagaacttattgccaaatccaagatgatgaagatttatctctgttttctcctaagagtgttatggttttagctcctatatttaggccattgatttattttgagtgaattttttttctttctgcttttgggctttaaataaaacaaaattttattgagctgtaaaattatttatatacatatttttggcttacatttatatgagacatccactccaaatgaaatttcaaatgaaatttttgacattttatttcaaaattatacttgtgtggttttctgcatatttacaaatagtagttgtaattttttctcttatgattttattctcaaactataaatactgacttagatacccttaattcatcataatctgtcaaacattttctgattttatttctctatattttatagaggatatgtctcaggtttgggatagtatcttaatacaataaagtaacttaacccctgaaaaaggcaaacatacagataaagtcttaccaaaaagcaataatttttcagtcaatttgataagaaagaaggatgaactatagacaccctgaataaaaattgaggcattgttatttttttactcatcattaagaaatatgggttttaattaaatataatttctataattaactatttaaaattcttttttctcttctatagttttttattgatatataataattacacataattatggagtacatttgatatttggttagattaatacaatgtgtaatcaaatcagagcaattagaatatctatcacctcatttatcatttctttgtgtttctaacacagaaatgccagatcttctcttctagctattgtgaaaggcacaataaattattattaactattgtcactttattgctctaccaaacattagaacttattccttctatttaatgtattttctttattgggtaaggaaatacatccccaatccccactacccttctcaccctctggtaaccatccttctatgttctacttccataaaatcaactttgattgagacatatgaataagaatatgtgatatatgtgtctttctgtgcctgacttatttcacttaatgtaaggtcctccagattcatccatgctggcacaaatgacagaatttcattcctttttttggctgaacagaattccattgtgtatctgtgccatattttttaattcatttatccattgatggatactcaggttgttttcatatcttgactactgggaatagtgctgcaataaatatagaaatgcagatatctcttcaacatcctgacttcttttttttttttttttttttttgagacaggggctcgctctgtcgcctatattagagtgcagtggtgcaatctcagctcatcacaaactctgccttccaggttcaggcgattctcctgcctcagcctccgtagctgggattacaggcctgcaccaccactactggttaatttttgtatttttggtacagatggggtttcaccatgttggccaggctggtctcaaactcctgacctcaaatgatccacgcacctcagcctcccaaagtcctgggattacaggcgtgagccaccgtgcccggccactgatttcttttcttttggatatatacccagtactgggattgctagatcctacagtaaatctattttgaatttttgaagaacctccataccgttttccatagtggctgtactaatttacattctcatcaacagtgtactggcatgaatttgtcatttcttgtattttttataatagctattttaactgggggagataatatctcattgcatataatatctgatttgcattttcctgatgactagtgatgttgaacattttcccatatacctgttggccatttatatgtcttcttttgtgaaatgactattcagatcatttgcccattctttaatcagattattcaggttttttgctattgtttgagtttcttacatattttggttattaatcctttgtcaaatggatgtaaatatttcctcccattctgtaggttgcctcttcactctgctgattattttcttgctgtgtaagaagttttttagcttgacataatcctatttgttgatttttgctttcgttgcctgtacttgtgaggttgtactaaaaaaaaaaatcttcgcccagactaatgtcctggagcatttcccagtgttttcttctagaagtttcatggtttcaggtcttacatttaagtctttaatccatttgatttgattttttaatatggtgagagatagggtcctagttttattcttccacatatggatagccagttttcccagcaccgtttattgacaagacagttctttccccaatgtatgttcttggcatctttgtcaaaaatgagttggctatatatgcatagatttatttctgggctctctattctgttccatttggtctatgtgtctgtttttgtgccagtactatgctatttttggttactatagctttgtagtacattttgaaatctgttagtgtgatacctccagctctgttctttttgttcaaaattgctttggttattcagggtcttttgttccaagtgaattttaggattttttttttctatttctgtgaagaatgttgctatcttttggatatttgacacccccaccccaccaccaactctcacattgaaatgtgatccctgatgttggaggtggagactggcaggaggtgttcgcatcatggaggcagattcctcatgaatggcttgttgccatccgcctggtaatgagttcttgctctatttacaaaatctgattgttaaaaaaaaggccgggaacctccttacctgctcccttcctccctgtcttgtcatgtgatctcaccggatccttttcagcttctgccatgagtagaagcaatctaaggcccttgccagaagcagatgctgatgccatgcttcttgtacagcctgcagaaccgtaagccaaataaacgtcttgtatttataaattacccaggtattcctttacagcaacataagcagactaagacaagtgtcactggtattttgatagggattgcattgattctgtagatcattttaggtggtgatatgatttggctgagtccccacccaaatctcatcttgaattgtagctcacataattccctcatgttgtgggagggacccagtgggagataactgaatcatgggggcagtttcccccatactgttctcgtggtaattgataggtctcacgagatttgatggttttataaggggaaaccccttttgcttggctctcattctcttctcctgtctgcagccatgtgagaggtgccttttgccttctgcctcctgccatgattgtgagccctctccagccacgtggaactgtgagtccattaaacctctttctttcgtaaattgcccagccttgggtatatctttatcaacagtgtgaaaacggactaatacaggtggtatggacacatcaatatcagtttttccaatccatgagcatgggatatcttttcactttttggtgtcctcttcaatttctttcatcagtgttttgtagttttcactatagagatctttcacttggtcgattaaatttattcctagggctttgtttttgcttcggtagctagtataaatgggattgctttccttttcagattgttctctgttgacatatataaatgctactgatggccaggcatggtggctcatgcctgtaatgcaaaaactttgcaaggccagggtgggaagatttcatgagcttaggagttcaagaacagcctggacaacaaaatgagactttatcactatgaaaatttttttaaaaattagccagctgggactttagtcccagctacttgggaggctgaggtagaaggatcacttgagcctgggatgtctaggcttcagtgagccgtgatcctgctactgcactccagcctgggtgactgagcaagaccctgtctcaaacaaacaaataaacaacaaatgccactgatttttgtatattgattttgtattttgcaacttcaccaaatttgttcactagttctaacagttttttggtggaatctttaagtttttctaaatgtagaatcatgtcatctgtaaacaagaataatttgacttgtttctttcccatttggatgccctttatttctttctcttacctaattgctctggctaggacttccaggattatattgaataaaagtggtgaaagtgggcaaccttgtcttcttccagatcttagagaaaaggcttttgatttttccccattcagtaggatgctagctatgggtttgccatatatgacttttggccatataaaagtcatatggcttttattgttttgagatatattccttctatactcagtttgtcaaaagtttttatcatgaagagatgataaattttattgaatgctttttcagcatctatggtaattatatggttttttgttcttgactctgtttatgtgatgtatcatgtttattgatttgcatatgttgaaccatccttacattcctggggtacacatgatcataatgaatgatctttgcaatgtgttgttgaatttagtttgctagtattctggtgaagatttctacatgtatattaatcaggaatattggtctgtcattttctttttttgttgtctccttatctagttttagtatcagattaatgctgaaatcactttgaattaatttttatatatggagtgaggtaagagtgcaactacattcatttacacgtaaaaatccagttgtctcagaaccatttgttgaaaagactactcttcccccactgaaagaacctggcacctttatcaaaaatccattcaccatagatgtatgactgtcaattccattttggcctatatgcctatctttgtaagtatcacattgttttgattactataactttgtattaagttttgaaatccagaagtgttagctttccaattttattcttttttttttacttttattttaggttcaggggtacatgtccaggtttgttacatacatatattgagtggcatgggggtttggtgtacagattatttcagcacccacataataagcacagtacccaataggtagatttttaaattatttttctttttcaatattgtttttgctatttaggggcactgtgcaattacgtatgatttaacaattggctttttcacttctgcaaataaggctgctggggaaactatttttcaataactaaactgaaaagatcttaacacctaatgcaacttttttccagatacttataagttttctggaaaacctagtgactgtacatgaagaatcaagttaatcagagagcagatactacccgtgacaaaatgtctaagtaatgagactattcctgctcaggaaataaaagcgaaaaaaaaaaaaaaaacctgtctcatttacatgttcaatcaatccaatcaatcaccagtgtttatatttctattaaacttccgtaaaagcccaaagcagagtttcatttttactttttaaaattctagtatctttgctaaaaacaatgcctacgaaataatgtctttgggaaggatgtcacccaagccgatacaaccaaataagttttgatcccaaaagtggtcccatggggaagaaagtatattcccaaagaggatgattttacccaaaaattctctacggcaactgctgcgctcagaataggcttaacacatgcatacatacatacatccacacatctacacacacgcattctaattccaatccggtcacatcttggtttggagtgaaattttttacaagcatattagctacttgtttattgtttcctacatcagctttgttgtcttatatatgagactctgtttccaatcagcttgtttctgcacaggccttcagagcgcccagcacagccccaagctcctgtggcagcctcaccagctcatctgttctacctgcagccttagcttgttctgcaccaaggcaacagtttttgtgaatcagagtttgaaagcctgagaaatggccgtgcgtgttggctgatgcctgtaatccccgcactttgggaggccgaagtgggcggatcacgaggtcaggagatcgagaccatcctggctaacacggtgaaaccctgtctctactaaaaatacaaaaaaagttagctaggcatggtggtgggcgcctgtaatcccagctactggggaggctgaggcaggagaatggcgtgaacccgggaggcggagcttgcagtgagctgagatcgcgccactgcacaccagcccgggcgacagagcgagactccctctcaaaaaataaaagaaagaaagcctgaaaaatccagccccaccgtgtgttatctctacgtcaccccgggtgtgttagccagggtcctctagagggacagaactaataggatagatgtatatacacaggggagtttattaaggagtattgactcacatcatcacaaggtgaggtcccagaacaggccatctgcaagctgaggtggcaaggaagccagttcaagtcccaaagctgaagaacttggagtctgatgtttgagggcaggaagcatccagcacgggagaaagatggaggccagaagagtaagctagtctagtctttccatgtccttctgccattttttattctggccgagctagcccctgattagatggtgcccacctagattgagggtgggtctgcctctcccagttcactgacgcaaatgttaatcttttctgggaacaccctcacagacacacccaggaataatactttgcatccttcaatccaatcaagttgccactcagtattaaccatcacactgggtcataacccaaaatgtagttccccgcaatcatctgacacctcctctctccttgtgttccttctgctctgtgccctttgcttctcttcctcccaaatcatccccttgtgccctctaggacgttcaaaccctgatgaaaggccggctccatcctcaggcttcatcacatcactcacttccatattgcagcttcctgggtttgcacccaattgagtaaagcccagcacacacatctacattccagttgcaaggggtgtgtgggagggctgggaaaggaagctgaccagattttacctttagaaagcaggacaatgctcccgaggtgagacgctatctatgcaaggagggtgttcaacatttggacagccacggctggaagatgtccactacccaggttttcatagtcataggcaaggggaagttgtggcagtggaggattcaagataattttttttatttttttttatttttttgagacagggtcttgctctgtcacccaggctggagtgcagtggtgcgatctcagctcactgcaatctccacctcccggattcaagccattctcctgcctcggcctctcgagtagctgggattataggtgcccaccatcacgcctagctaatttttgtattttagtagaaatggggttttgccgtgttggccaggctggtctcgaactcctgacctcaagtgatccgccctcctcagtctcccaaattgctgggattacaggcgtgagctactgcacccggcctaaattttacaggaagcaggactcagtgatggattggatgtggactacagagagagatgactagttttccagcctgagcaacctgagagaaggtgaggccatttactgagatgacggaagaagataaagtgaaggtggaaatgataagttcagtttgggacatattggccttgaggggctttgtaaattttcaggttctgaggctccagtggtggcagcagcaatcacccgtggccttgtgtgtggcacccagcatctgttctaattccatccatcaccagctgattctcatttcccaagcctttgttcaggctatcgaactccagggatctgagttaccctctcctattcctaaacactgtccccagccaaaccccacttaacctaattactaggcatgtgagcctgggcaaaccgcttcactgctctaggcctcggttcctcatctgtaaaatgagagggttacaaaatatgacgtccaagggtccttctacgtccattctggttctaaataaaatgcggcactttgctgatccaccgcgagagggcaccagagaaacgtcctcgcacaggaccgcgctgaaagtgccccgaaccagccaggcacggtaccaggcgggatgctgtgagggaggtggaaataaggtggaacgccatccttccgcatccttccgcatccttcctactcgggcaaacccttagatctgggaaaaacgttcgataagcagcaaccgcagccaacattctatttatcccctttatttctttatcaagacaaaaatcattctccggctcttcactgccagaacctgttcgttaaatgcacgaattttcaaggtaaattagatccaactggcacattacaatcacctggatgctcttaaatacaccgatgctccgctcccaacccagagcagcgtgaggggccacagccctccctttagctaaaagatgaacttgggacagattcctgcttgggacgggttcctgctcatctcccactcctggaccccggaaactcacagcctggttgctaagtcagatttaactcctttgtggacattgccaaaaaagcttgagacgatcctacaggtctccagcagggagcacgggggtacacgtcataccctcaaagctgggtcggcaaaaagcccttgatgcgtggcgagcttgctctgttatccttactacgagaagcagagtggcatcttgctccttggatttctagcatacagtcctgttatgatagctaatcgataaactgtctggcttggaaatgcacggtcttccagtctttccctctgtgtgcggtctaatcccggtcatgaacacgaaacacaaaagctgctgtttgtggtgtgagccacaccttcctccctcacctctaagatggtgagaaaagataagcttatccgcccaattcatctgacagggtttgggaggaccagatacatgtataggtacatgttctgaagtgtataatacaaatgcaatctccaggtggaattattttaaaggtgtgattaattttactgttgataatataattatacaagggtgtcattgttttcaaggtaacgttcacatcacagtgttttatttacaatagctaaaatgtaaatgatctaaatatccaacattatcaaatatcaagttgagaccctccctttgttagcaagtatttgaggacctatagcgtgttagtctgtttttgcattgctataaaggaatatcttggccaggctcagtggcccacacctgtaatcccagcattttgggaggccaaggtgggcggatcacgaggtcaggagttcaagaccagcctggccaatatggtgaaaccctgtctctactaaaaatacaaaaattagctgggcatgtggcgcatacctatagtcctagctacttggcaggctgaggcagaagaatcgcttgaacccagaaggcagaggttgcagtgagccgagatcatgctactgcactccagcctgggtgacagagtgagactctgtctcaaaaaacaaaaacaaaaaagaaaaagaaaaggaatacttgaggctggtaatttataataaaagaggtttaattggctcatggttctgcaggttgtacaagcatggctccagcgtctgcctctggtgaggcctcaggaagcttctaatcatggcagatggcgaagggagagaaggtgatgtcacatggcaagatccagggttgccgggaggttccagacttttatacaaccaggtctcacgtgaactcaccgagcaagaactcacttatcacctggggatggtgcgaagccattcacgagagacctgcccccgtgatcaaatcacccccaccaggcctcacctccagtactgagaatcacatttcaacatgagatttggagggggcacacgtccaaactctatcatttggtgtgtcatcccaaagggaatctttgtaaccattaaaaagtatgttataggaagatgcttaatgataaggggaactactcatgatggataataaatgaaggcagatagtacaataaggtacaatatgattctatttaaatatgcatttatatatgtgtataagttagacacgtgtatacatatgaaaatataggagcaatacccaaatgttagcaatggttatgtagaggcaaaccggatctgccatatatgggtggcttcttgtgtcatttacagacagaagaacagctaatatgacaactaagtgggtttccctccatttaaatttattactaattaaattgtgaccaggtacaatggctcatgcctgtaatcccagtactttgggaggccaaggcaggaggactgcttgaggccaggagtttgagaccagcctgggcaatacagtgagatagtttcactacaaagaatctttttaaaatcagccaggcatggtggcattttcctagctacctggggtggtggggcagtgaggggagtggggttggggggaagtggaaggctgaggcaggaggatcatttgagcccaggagtttgaggttacagtgagctatgatcactccactgcactccagcctgggtgacagagtgagactctctttaaaaaaaaaaaaaaagtgtgtgtctgtgtataaatgtgtgtgtatatgtatatataagctataaaaatttgaacttacattaattttggaatttaaaaaacaaaagaataattcaagcaaatgtacttcaaagaatgaaggacttttcagttttacagctctgaaaatcctcatgttgcatcttgcttttccattcctatttcaaatactgaactcctttctagctcagaaaaacaattattttgcctgtacctatcttagattctctggctggttctctagccctgtaacttagactaacaaaagacaagttaacaaaagaaaatatacagatgtattagataatggttttatgtgaaacgagatccttcattaggaaataaagacctaaagaaatagttaattctaagtatttttttatatatactaggtttgatgaagagtagtacctggggtttggggtttatatgggtacaggatagcgggaggtggcaggccaaatggcgacatctgggtgtgaaaacaggaatgtccccatttagggctgcaggtttccaggcctgggggtggggcctttgccagggaactgccctcttctacccagtatttccctgtctcctgtctgtgtatcagcttgttcagaagcccatcaccttctcaggaagttcttggaggaggaagataaaacagctctcagggaacaggaatgctaatgacaggtgtatatcaggggcagctcatacacttgtatctgccagattataagcacctttaagcagaaatcatgcttatccatattatgccccccacctcttatgtataataggtgctcaataaatgttacatggatacgtttctcaaatcaccaaggtaaattagatctaaatattttcaatccaattacaagacagagaaggaaaaaaggactaagtttcttgttagtcatcaatattgaccaatagttcactgttctactggcacattaaaatcacctggaggaagcttttaaatacagtggactctggaacaacatagaagttagggacaaccccccatgcagtcaaaaattcatgtgtaactcttgactttccaaagacttaaccattcatagcctattgttgaccaaaagacttaccaataacatcaagtcaattaacacatattttgtatgttatatgtagtatacactgtattcttacaacagaataagctgaagagaagaaaatgttattaggaaaataataaagaaagaaaatatatttactattcattaagtggaagtgaattaccataaaagtcttcatccttgtcatcttcatgttgagtaggctgagaaggaggaggaagaggaggggttagtcttgctgtctcaggggtgacagagacagaagaagatccacgaatatgtggattcacacagttcaaacttgtgttgttcaagggttaaggtatgatgatgctctgatctcaaccccagagattgtgattttcttagcatgaggagggagggtcttggcatcagtatattttcaaagctactcaggcttgagcatatacaactgatgtgtatgatttcctaatttcactgtccctcaataccaccagaagaaaacatcagctacctggaagccaaatggaggccatgtcatattctgagcatctgtctacatgcacattaagctatcatgtgcttcccttagacaaaagattgcacctcttctgcaattgcaggaaaccccaagtgaaaaggtcctaatgagcacaacagggaaagagcaagggtgggaccttccagttaccgagtccctcactatctatgcatcactgcccgctccttgctcctaaagacctaggagttcctcccactgcccctcctcttcaccactgccacatcccaagtgtggctatcagttattagtagcagagacactgagtacatatctatggaactttattactcttcactttattgctgtcccagaaaatatctatggaaacttatttactcttcactttattactgtcccaggaaacaagcataaacaagtacctgtgtatacgtgtgtgcaactgaaatttctatgaggaaacaggaactaaaaataataacgaacacaggaagtaaaaatagtatcatgaaatctcaatgttaagcccttgcctatgtttgattttgacattttcgtagattctgacctttcttgtaggcatttctgaacccatttgcaattatctggggtaattccctccagttcttatcatggagagctacccttatctgcatcataaacaggtgaaattcttcaaattttacccagtttccaggactaatgaaaactctagctcctttcagaactgggttcttaattgttggtctccatcgaaaagagaacagtgaagaaagttcttcagaatctgttcccttacagtttcctgtgtggctctggatttatctcttgactttacagagattgctcttcctcttctcagaagtctctgtgtcaccagaaatccctctcccagtgtctccatttggtcactgtcttagtctgttttgtgcagctataacagaatacccgagactgggtaatttataatgagcagaagttgagtgcctcatggttctggaggctggtgaagagagcaaagatcacagggtggccatcaagcagaccatctggaggcaaaatcccatatctaagaaattcagaagtcattacatttctctattatctaaagctacatctggcaccagacctctttcccaagaatttgtaagtaactagaatttctatacatctccagaatgcatgcatgtcgaaacacactgtgcgacctttgctgacatcaaagcaccaaaatgtctacaaatgtaattatttataatgacctgtgtgactaatatggtccaaattacccttaagctcccactgtaaggtccataaatatcactaagggaaatccactgcagtgcactcagtcctgtcttactgaggcaccccactgcactccgctgcagcattctttctatcaaataatactttcctcttcaaacctatactgctgttggtatattcttttacccccgtgtattagtctgttcttatactgttaataaagacatacaggagactgggtaatttataaaaggaagaggtttaattgactcacagttccacatggctggggaggcctcacaatcatgacacaaggtgaatgaggagcaaagtcacatcttacttggcggcaggcaagagagagcatgtgcaggggaactacgctttgtaaaaccatcagaacttgtgagacttattttcaatcatgaggacagcatgggaaaaatgcacccccaagattcaattatctcccagaaggttcctcctatgacacatgggcattattacaattcaaggtgagatttgggtggggagacagagccaaaccatatcaccccacaagccaaccactctcattgctggggctctgacacctcacccagaggctggaaagtccaagattgaggagctagcatctggccaaggctttcttgctgcatcatgccatggtgcggaaaaaagagagggtgagagaaagacagagagaaagagggagaaagagtaagagattgtgaggatccatggctgttagctgcctaaacattcactgagaaatcactggcatgaggcagattgaggaacggaaaaagagcatacaaatttatgtaacatgtacacataggagccttcagaatgaagacccaaatttccagtgagttacagaaatttatgtaccatttttatgttacagaaagaatgggggcttggattcttgtaaaacaggttatgggagaggggagaagaggaattctattgagcggcaataagtgattgctagggaggatgattgggtggagaacagagatgaaattgtaaatagttttctttggaatttaaatggacttggaaacagccattatacttataaaagttctgctctggtgtggtcacatcttagttttcttttctgcaacagataatgagacaacaggaagagaaagaaagagtcattattctccttggtagctctgtgtattagtctgattcgtctgttctcaggctgctaataaaagacatacccaagactgggtaatttataaaggaaagaggtttaatggattcacggttccacatggctggagagacctcccaatcatggcagaagtgaaggaagagagcagagtcacgtctaacatggtggcaggcaagagggcatgtgcaggggaactgcccttcataaaccatcagatctcatgagacttattcactattgcaagaacagcatgggaaaacctgcacccatgattcaattacctcccacaacacatggggattatgggagctataattcaagatgagatttgggtggggacacagccaacctatatcagtttgtatcttaggcagataaaggaacttcagtttgtttgggagagctcttggggataggtggtcagagaccttgaggcttcttcatttcagcatggcagaaatgccatattgtgaggtattgctttctgagccccaacaagttcaaacttgtaaactccaactaagccccacctccagagtctgttgcattggggattaattttccaacacatactttttggggaacacattcaagtcatagcagtcactaagattgtcttagtgtgttggtgagttcggccacacgtgaagcatctttacccatctgctgtggtttgaatgtgcccccttctcaaattcatgttgaaacttatattagtccattttcatactgctatgaagaaatacctgagactgggtaatttataaagaaaaagaggtttcatggactcacagttccacatggctggagaggcctcacaatcatggtggaaggctaaggaagaatagaggcacatcttacacggtgacaggcaagaaggcatgtgcaggggaactgccctatataaaaccatcagatctcatgagatttattcactattatcagaacagcacaggaaaaacccaccctcctgatacaattacctcccaccaggtctctcccaaaacatgtaggaattatgggagctacaattcaagatgagatttgggtgggaacacaggcaaaccatatcattccactcctggcccttcccaaatctcatgtcctcacatttcaaaaccaattgtgccttcccagcagtcgtccaaagtcttaactcattacagcattaactcaaaagtccacattccaaagtctcatctgagacaaggcaagtcccttcacttaagagcctgtaaaatcaaaagcaagttagttacttcctagatacaatgaaggtacaggcaatgggtaaatatacctgctccaaatgggagaaactgcccaaaacaaaggggttacaggccccatgaagtccaaaatccaataggtcagtcattaaaccttaaagttccaaaatgatcccttttgactccatttctcacatccaggtcatgctgatgcaagaggtgggctcccatggccttggacagctccacccctgtggctttgcagggtatagcccacctcccagctgctttcaaggcctggcattaagtgtctgcagcttttccaggtacacggtgcaagctgtcagttgatctaccattctggggtctggaggatggtggcccccttttcacagtttcactaggcagtgccccagtggggactctgtgtgggggctcccaccccacatttctcttccacactgccctagcagaggttctccatgagggccctgcccctgccggaaacttctgcctggacatccaggtatttccatacatcctctgaaatctaggcagaagttcccaaacctcaattcttgacttctgtgcacccgtaggctcaacaccacgtggaagctgccaaggcttggggtttgcaccctctgaagccacagtctgagctgttccttggccccttttagctatggctagaccagctaggacaaaacagggcaccaagtccctaggctgcactcagcaggggagccctggacctggcccagaaaaccatttttccctcctaggcctcaggcctgtgatgggtggtactgctgtgaaggtctctgacatgctctggagatattttccccattgttttttggtgattaacattcggctccttgttacttatgcaaatttctgcaacaggcttgaatttctccctagaaaatgcatttttcttttctgttgcctcattaggctgcaaattttccaaatgtttatgctctgcttcctcttgaatgctttgccacttagtaatttcttccgccagatatcctaaatcatctctctctagttcaaagttccacagatctctagggctgtagcaaaatgctgccagtctctttgctaaagtataacaagagtcacctttgctccagttctcaacaagttccacatctccatctgaaaccacctcagcctagactttatggtccatatcactgtcagcattttggtcaaggccattcaacaagtttctaggaagttccaaactttcccacatctttctgtcttctgagccctccaaatccctaggaagttccaaactttcccacatttttctattttctgagccctccaaactgttccaacctctgcttgttacccatttcctttcttactcttcccctctgtattgagacttcatctcaaaaaaacaaaacaaaaaaacagtgtgtatcacttctccttttgctctcttcctcctgctccagctggcttcccctttgccttccaccatgattgtccatgcttcctgtacagcctgtgaaactgtgagccaattaagcctcttttctttataaattacccaatctcacgtagttctttatagcaatgtgagaatggactaatacaattaataaaacatttcagagtcatttcagaatctaaccaatgacttggacttttccagcttgagatgccagctttcctcttgcctccccaagacaattttatttttgccatgtcaaaatttcttaaacatagtatctaccaaggtacaataggaacatttccttgtagaaagcatgaccatttcttaacttataaaaacaagctccatggcagagagggatcccctctgaggccccaccacatggcagtggcagcctgggatcccactcccgggattagtgatattgctggagtctgtagatctgaaacataagaattatcctggacaagctgtcttcataagagagctcttaataaataaaaatcagaccaacttttctgggctattacagaaaaatgagcaaaagaaaataacaactgaagggtagcaaatataacacctcaaaatttgacactttggcataaggaacctttcttttcttttttattttattttatttttttttgagaccaaatcttgctctgttgcccaggctggagtgcagtggcacaatctcgcctcactgcaacctccgcctcccaggttcaagcgattctcctgccttagcctcctaagtagctgggattacaggcatgcaccatcacgtctggctaatttttgtatttttagtagagacggggttttcccatgttggtcaggctggtcacgaactcctgacctcaagtgatctgctcgccttggcttcccaaaatgctgagattacaggcgtgagccactgtgcccggccgacataaggattcttctgagatgaaggcaattgagaagaagcagataggagaaaagctctctgcccttcccctatttgcctaaaagcaaaacagatttacatcagggtccctcctctcgtctttaccaaaaagagatgactttacagccttatcaacctgaagatggcaccagaggaatccacatgacaaactagcctttatccacccttagtttcctttctgtttatttgccttcccacaatttgccacccctaaagactgaaggtccttttccttgtcttgtcacttctctaaagatgtactgctctttgttaaaggtactatatacagcaaagttctcagccacctctttgacagttactctttctctgagttttctcccatgtgtatatgaaatatacttgttaatcagcttctgtttgcttttaataatctgtcttttgttacacagatcccagttaaaaactaagaaggatagaaagaaaaattattttcctctcacaggcaattacaagttttaaaactcaaatataattttttaagagaatttcaagatcaactgcttaagaaagagcagtatcaataaaactctggtagaattctcaagtgtgttccttataaaaattgagtgaataatataattttaagtaaaacaaattgtgtatgccctgaacaagattaagaaaaattaaaaaaaaatgaaacagttgatggaatttcatgtgtatttgtactatagatttttttctggtgtgcagagttataggagaaatctgaaattcaaccagaaaaaaatattttagtaaatttttcctatcttagctaagatatagattatgggttttaattcttttttaattcccaaactggggtacttcagactcagctatctgaacatgaattattgagtaatacagcagtgacacagggctcacccacaaattgctagtttgattacagcttccatatttgctttaaaaatcaggccgggcgcagtggctcacccctgtaattccagcactttgggaggccgaggcaggcagatcacgaggtcaggagttcgagaccatcctggccaacatagtgaaaccccgtccctactaaaaatacaaaaattagccaggcatggtggcatcacctgtagtcccagctacttgggaggctgaggcaggagaatcgcttgaacctgggaagcggaggttgcggtgagccgagacggtgccactgcactccagcctgggcaacagagtgagactccgtctcaaaaaaaaaaaacaaaaaaaaaaaccagtacaaaaattgaacacactttcaaggtagcttttccattatttaaaattcaatatgaaaatgtttatttttattctaatcacttagatcacttttaagtctagattaacttttatatatttaacagggcggtgaataactttacaagtggatacaaaactgtaattagaataaaggcattttccagcttgttctctacaaatgccaattttcacttgatttgtcaaaaccagagctagaagcttccaaagcgaacttggcaccatctcatcatctcagaacactgagaacattgaggccctgcagctttgtcgatgtgggctgcgggagggagagagagacacagcaggtggtgaccactaattggtcacaatgataaagtaggtattattatccccactgcagaggtgcagaaagagacacagaagcattggtgttttgcccaggttcacacagctggtcaacagaaatgtcaaggttcaagcacacagggggcccaccccaaagcccatgcacttcctctccattcagacgccctgttctcaatacagaggggaagagtgagaaagcctggactgccctcgacaataactctgacttctctgtaaaaatttccaatttcttctcagaaactccctaagataattttgaaaatatattccttctgacagctaaatgtcataataaatgtttttattaccaatttaagtagtttcaaaggatgctatgtctggctatggtagattactgcagtaatggtccctaaggagtcacacttccctggatccatgaccctggagagttccttcccaactggacacacggcttgcttttgccaagggttatgaaaaggtgaatcaggaagaagcctgaaaatcacttgtgttctggggcttgctcctgctactctttggaacctgcagtcaccatgtaaggaagcctatgctagtctaccggtggaagagagaccacgtgaagctctcctggctgaggttcctagaccaagcagccttccaactgacacatacgtgaggccacagggtgtgagaacatgcagccccagctgagctgaaccgccagctgaccacggagctccaccaacccagccaagtccagaactacccagctaaacccccagattcatgaacagcataagtgcttgttgtattaagccactaagccttagggtgcttttgttacctagcaattgatacacttacatattataaaatttgatattttcaaataaaactattatgtcagttttaatgtatccagtgtatccaaaatcccaaatcaatttaatgctcatcatccattcaaaggatacatttaaaaactcaaaaatttcacatcattccttttttcttttagccccattttctaatatcctattatatcctattaccctatcaaacttctctagaacaaagatctagataaatgtctatgttaaaagttttggcatttcctatgaccataaagctccaactatttttttaaaaaatcacttatggattgtgttatcactgcaattattattggtagacgattgaccaatataaaaatatatcagctaggcacagtggctcatgcctgtgatcccagcactttgggaggctaaggtgggaaaactgcttgaagccaggagttccagaccagcttgggcaacatacggagatcctgtctctacaaaaaatgtaaaaattagccccaggggtcatggcatgtgtctgtagtctcagctgttcaggaggctgaggtgggaggatcgcctgaatccgatttgaggctgcagtgagctatgattgcgctcttgcactccagcctgggtgacagagcaaggccctgtccccctccaccgccaaaaaaaaaagtgtatgtatatatatatatatattttagtaaaaggtaccaaggtttatttcaagtgaatgacactccatccctaccttgactttctatccattccccaaactaaacaactctgttcctggagccattaccactttcccatctgctggagtttatatatatatacacagagagagagagagagagtttatatatgggtatatatatatatatatatatatatagagagagagagagagagagagagagagagagagagatacataaaaatatcaaatataaagagtaaaatttcactggaaataatctcttaaatgaaatggatatttttatttttcaattagttcatgtatccagtcagtggatcttatttttagctagacagagttctgcatcaattctatttctacttttcatttttgtagatgcaagcacagaaaagccttgtttgaagactactgggagtgaaagaagtttaattacggcagttttatgtgccactcaattctctgacctcttgaattatctgcaccaaatcagagatatcatctataattaatgatttatcacctgacgacttgattaggtccttcttcaaactgattaggagcaaataattagaaaccacctggcttaccgaaggattagcttcctggtcggtggtgtcatttactttccgaacacaccacttctctgtgaccatttgtttggtatcccagaggttcttcctctaagtacaatccaggacagctgagaggagtctctttttttaataaaatgggagcaagatgactgtcaaaagggagggagggaagagaatgtgcagtttatcacaagcacattcccaagcagatcagttttaggaaagggcatttgacattgagtatctagataaggattccccttaaaccatctgcacccttgaacccttggaaagtcacattttggttcaaggatcattgctctattgggtctgatgcaccttactccagctggtggcgagaaactccctgagacttgaaaggttaatacgagacctgccagtcattgtctgtttccctagttttccacaaaaacacatcttttatgcaagggctcttagtaaaaggtatcaagatttgtttcaagtgaatgacactccgtccctaccttgactttctgtccattccccaaactaaacaactctattcctggagcaattaccactttcccatctcctggagtttaggagtgaattgtaagattatggtcacttgagacctagtcctgtgacatcactggtccaactattgagtctattcaaaccttaaaaaaaaaaaagtcaataaatccttattcctcaaaatggccatgtctgtcatataaaactgatttcatcaatatcataaaaaactcaaccttcatttaaatctggaggcaagacatcagacagcatgtatgaggtaagggaatatttaaaatctctgaaactttgaaggggagttcatggatgctcaactcctgtcaccagaaacacccaataccctaaagactaacagtaaaactgagtgtgcctgtaatcccagcactctgggaggttgaggcgggtggatcacgaggtcaggagatcgagaccatcctggccaacatggtgaaaccctgtctctacaaaaaaattagccgggcgtggtggcacatgcctgtagtcccagctactcgggaggctgaggcaggggaatcgcttgaacctgggtggcagcggttgcagtgagccgagatcgccccattgcactccagcctggcgacagagcgagactccatctcaaaacaaaacaaaaaactgagtgtgaacagagaaaggaggacaggagtgggagaagtcccagctcaccaagcatatccggcccaaataatcgaaatacaaactcaggtggaaaagccatttctgtgacaaagtggacacactagacaggaagtaggatcttgacatctcaccagaagccaaacaggaatacagcatcttagaatttagaaatggcaatcaagatctttaaaatgtatataaatgttcccaaagctacctcttcagtattccctcaggaagcaactggaccagtgcacagaaatatccaatatgggtgttcatcatgttttcttaataacaaaataaaacccctggaatccttcatgcccatcagcagggaattggttatgtaaattacggtgaactatgactattatgatggatgtggccatgacttacagtgacgcagacctttttagaatgtcaagaaaatgtctacaacttgtatcattaagagtaaaaatcaggttaacaaaactgtatgttaataaaatataaactcacttttaagtgtgtgtgtgcacacatgcacaccccatgcatatattcaacaaaccaatcaaggacaatcaaatgttaccatcttgattgaaagtgaggggcctataattaaccaaccattaatgtctaaaatacaaggtaatggcaccacgcggaacacccaagcacagagtacagcagaacagaacacaggacatcctgtaaccaaatcattcttgggaacagcccaggaagccccaggtggtgttcaagacaagaaactaagtatcgaagttaaaaacgatgaagctggtgcccagaaagctgaaagtaatcccactagggcctcttgggctaaaaaaatctaacttcggcttgacctgggtatgaagtatgttgaagaacatggaaaaaaaaattctgaaggattatgtgattcctgaatttttaaaaaaatattagggaccctggatttgggttttttaaaaaagcgtcacacctccccaacctgagggtagttgactgtacagaaagtgcaaggtgtgcacacatagtctaaatcccttgtcatttttaatcccaagggactgcctgtaatcacagcactttgcgaggccaaggcgggtggctcacctgaggtcagatgttcgagaccaggctggccaacgtggtgaaaccctgtctctaccaaaatatacaaaaattagctgggcaagtgatcctagctacttgggatgctgaggcacggacaactgcttgaacctgggaggcggaggttgcagtgagccgagatcacaccactgcactccaacctgggtgacagagtgagaagaaagagagagagagagatagacagacagagagagagagagagagagaaataaatcccaagtgacaacagcagaggatctactgcacacaagttagaagccgtcagcccagttcgacagcagtgacatgaagatgtgcgtgactcacatctcactcaggaacacagtcgaggtggtggactcagtgacagcagaaattgacttactgaaacagtagaatgtatgggctaaaggttgcttcaagatgtagaaagaatagaccagaataaactccattgtcgacgaatgaggttttctatgcaatgcattctattggtacatggtggaggcggagaggcatatgacaggcagaagaatggaaacaaggtgatcccaggaacacgacctgggagggtttctacccctgcactgttcagcaggagacagtatcttgccaacagcatccatactccatgtgtttacagaagccttacacattcatgatttgtgttctgaatactcctttttccttctaccaacaatgacttcctttagagaagcctagggggattgtgacactgccttttttttttttgagatggagttttactctgttgcccaggctggagtgcagtgcggcacggcaatctcagttcactgcagccccacctcccgggttcaagtgattcttctgcctcagcctcccaagttgctgggattacagatgtgtgccaccacgcctggctaatttttgtatttttagtaaaggtgggatttcaccacattggccaggctgatctcgaactcctgacctcaagtgatccacccgcctcggccccccaaagtgctgggattacaggtgcgagccacagcaccggccatgacactgcaattttgatctcacacattctctacgtaagtggctgaatattttgagtatttctttctctccttgtattttcatgacttccccccaacctgctcaacacctcccttctaaggcaactgtcacagggattccctatcccagaataggtttgcatcaaaaagcagaactgcctataaaacttgggtatcaacaaaaaatttgcaaaaagacacaaggtaagggctccccactgcaacccagcttcactgtcctcatccccataaccacacacacacagaaaaggcaatagccagcagggcacgatggctcatgcctgtaatcccagcacttcgggaggctgaggtgggtggatcacgaggtcaggcattcgagaccagcctgaccaacatagtgaaaccttgtctctactaaaaatacaaaaaaattagccaggcgtggtggcgggcgactataatcccatctactcgggaggctgaggcaggagaatcccttgaacctgggaggcggaggttgcagtgagccgagatcacgccactgcactccaccctgggtgacagtgtgagactccctctcaaaaaaaaaaaaaaaaaaaggcaatagcccctggctggggatacagtcaggagagctctgtggaaggggagggaccagaacttgggggaggcatcctggcaacgtcccagagaggagacagaacaccggggaccaggctgcagaagaatcctgggtgagcaaaaggatacactagagagcccaccatcacgcgtgaaggagctcgtggatggatgaggacactggtcactgctacagttatctttgcagaaggaagcaccccgcccccaaaccttaagaactgaaagggagaggaaaactgaggatgttttctgccagcctggtgggagggagatgagcctgaaaataaatgaaaactagtggggaaaggcatgattgttcctctatagttgactttgagcactcatttcctctgcacacacaggctcagctattggtgaggaaagcagcccaaactgctaaatctcatttacaccagagtacaaactgctggaataacttcatggagcaggtgttaaagctggcttcagtcatcccccaagtcggatgcactggctacagagagacatcttgtgtcttaaagatgtacatattgctgctgtaatgcctgaatatatttaaaataaagaggaatgtgctccaaatcactgctcaacatcagaatgtttggaggctaccaaacgaatgtgactcaaacatgaacatggatgagtcatcagaggatcctgttaagatggaagttctggtttagtgcctctgggtggggcccaagtttctgcatttttcttttctgagacagggtctctgtttcccaggcgggagtgcaacagtatgatcacagttcactgcaagcctcaaattcctgagctcacctcccacctcagcctcctgagtagctgggactaaaggtgtgaaccaccacgactagctaagtattttatttttcgtagagatgggggtctcactatgttgcccaggctggtctcgaacttctagcctcaagtgctcctcctgcctcccagttttctgcacttccaacaagctcccagtgacaccgacgctgctggtgtcaggacctccactgtgaggagcaagtagctacaccacagggctccccatgcgccagggagaggctcttctagtgacaggagacaatcttttcactgagggcagggatggatggggtaacattgatgggtaaggtttgtaagggactcgagaggctcagatctggggactctgacaggaagagaaaggcagcccaagactgtatttaccttgtttggtgattctgtgaaagactcaggcagcaggcccccggtgataaaatgtggagtgattcaagagctcagtcaggccagtcagagctctgcacttcaccccaatattttcacaggaacccccccagcctgctcccatcgggataggcaggagactggaaaagaaacagtgcccagtaggggcaacgttaggtcaagatgccatgcaactgtaatgcaccttttgttgttgttaaaacttcaagcgctacaacagcgttctcctgatgatcacgagttatttcaataaatggcattcccaggaatcttctcccacggccgctctcccgccaacaattcatactcatcctcccatccaaaaaggcatagaaccgcccagacacttttcgttatttttattgtttgacaagcatttacaacgttccattcatagacctaaaaacataaaaatagaccttctttcagcttataaaagaaatatataagaacttttgacatagacacgtcatgaccttatgtacaagagacaatggcaccctctccaagcaccagacttccgagtgttttcagatggatgtgttgcactggagccagtaaatgcgacgattagaagcctctgcttccgttttccatctggacgcgatcgaaccggagatgatatggaaaaatgcagtgatacaaagggtatagaaaccattctaaagctttttcagaaaaccagaagatatagcaaaaatttaatagaataaaactttcaaaagatcaagctcgaagccctggaaacccgaaaggcggggggaatacagggtgggaacgcaggaaaagcaggcagaggcacaagagcatgatgtactgaactctctattgtctggaaatataaagtcataactgatttttataaaatataactcctaaagctactataaaattcaggtctttaaagtacctactgatgtgtcaaacaccaaatagatattttccccaaaaagaaagttttcatagtattttaaacccttcttaggaagtggacattgtgacatgggaaaagaaaaagctataaacctttttttaaaaaaaaaaaaaaaattgaaagtgctataacttgtttttcttcttagtatttggatatctgtttagactgttaatgttttgagcatgtttaccctgtttcgttggcatgaagaaagtgttaaacacaagagaagtttttaaagaggttgttctgtttaaaggtttggttatggactgtcagggaaggggaaggtaatctatggatgaagatgcaattttgatggaaaaaccaatgatcaccatggcaaccccatgagaaggaggctcccctccctgccatgtgcaacagacacacacaccgcccaccggggtgtcatgtttaatccaaccaaactcccatctcaaatatagattcaaacattaaaaaaaaaaaatccgctttttggaagaaaagtatatccttcgcatgagcttgctggcctttcatatataaatataaaaccaccacgcctcactctctctgtaaaaggttatatcctcattttttaggctcagggatacatacactaacactgtaaaattctcatctatttgtgcccctgtatctcaggtaaaatacaaaaaatagtgtttcttttctttctctcaagcgataaatttggatctcttttcaaagagtttggcatctctataattctatgcaaaactagagcttccgaacatggacacagagtaagaccagccatagaccaaaacaggaaggaaaaaaaaaaagaggctcattgaaacatgaatcgccaccctctcctcacacattcttaaaatacacggagattctcagacatggaagagggaagggtacagtcagaacacggcaagctgtacacatttcattttgtgtgtgaaagaggtttccccagctaggagactgatttcagatagaaggatcgtgtgtgtgctactatcccttaaattaatctgttgtacatccgttaactcctggggtgatttgctttccagtgctatagaatcttttttcttttaattgttcaggccctgatttattgagaataaataaaagcccttagtaatatacagaagataggactcaagcttatttgggattctgatcaattctttctgatgttgttgaaaatgacaaagttgggtggctacatggcttcagaaccaagtcagctgccaaaaccgtgtgtgcaagagcgcgacctaaggggacattcttgtcgacggtacaggagggtgggcagagttagggcaggaagtatctacacacattctctacggggcaggtgacgcagtcagatctcagtgttcagtttcctggagggggcaaagtcttcacgcctaacccaaatgacttcctcgcttgcgctctccaggcctccattgatccccgacagggcagcttgcttcttgagctgtgccatgcgggacgcgtgactatccagggttttccggcctctttcccgctgactgatggaggtggcctgaagccgctcctgcaggtctctgtccactgaggcacccttcacggactcacagaactcatcatcgtcactgaggatgtctgtctccttgatgtcatcttgctcctcatactgagcaagatcaaactgctcctctacccatcggtcagtgtccccaccaccggggggctgctgggactctttctccgggctgcttgcggagacggcatcagaatcaatggtaaacctgtttcgagccagccgccgcctcctcctcccaagagacttgcttggggcagacactgcacacacacacaaaaatataaaaataaaacccccacatgctttacgtgagatgaaaatccagaaagcaaaggacaggagaaaataaaaaccaaaacggtatgcattgaatgccttgatgtcttttggggcttaaagtctacatatcaccaatctgtcatggagcatttaccttgtcgaggtatctggacttagaggatgttctagcaactgatgcaagggcaagggggaaccggggcacacaggagaggttgtaggttatgggcaaaggggcactcaactccctctgaaataatctactgttctagcctgtgcacctaagagatgggtaacacagacagcagctgctctcaagtagacagaccactgatttggggatcagttagtgagttagtgtcctcaatcctggccatgtcccatggcccagtgctatgaagatccccagggctgtcccagggttgtttagctggaataggtctttagtaagggtgggggtgcatctatggttttgctgtctttgtagaatgtgcatcaaggaggcagaagcaccagtgtaagttacttgttttctgggaactggaacataacatttcttgggatctgcagttagattaagggcaccacgtcactcttagagagcctatgaaaaagagtggctctcaaagacatgggatcttcagttatttccctgtcttctttctgacaaagtcccacatgagctaggaagctaagcaaatgtgtgccttagtctcccccaattacagtctgtgtatcactcattcttctccaaagcaattaacatatcagtgcctcattggaatgagaaataaaaaaccgatgacatccaagcagtttgatcaacaaagtgctgtataaagtgactaccagttaagaaaaattcattctttcacctactgccctctaggaagccagaattaaaaacaagcaaacaaaagacaccatccgatcaagccaacaatcccaccacacacatacacgagactgctcacagggaaggcttctgcttctccctcgagagtgaagcggttgttgcattagacacgaaaaggtgaaatgcaacacgggctttccagtggaggggaagagtctcaacgccaactgggagctgctttcctgaaacctaagccccagaaccatccaattgcttcagtgctgctagaagatgcctcgtgtctcaattactgccaaatgcagccttgacttcgaacccagcaggcacagggttagagtggtcaacgaggggctgaattggctctcatggcagccatcctctgcttcagacccctgcgtgtccatcactattcctgagtgttccgccatctaaaactgtggaacaaatggacactactgttggttgaggatgggaataaaagccatttccaggcaaaatggaaaaagggaatagaaaataggaaaaaaaacaaacaaactctgacttctattgagaagagacaaaaattcttgttcacttttatctcagcaccagcaaaatacagcatccctctctccaatcaccacattagaactaccccaactcaaagctactggaaatatttgttaatgatttgcatgctgaagtatctaggagtaaagtgtgttaatgtctacatctttgaaatatgtcaaaaataagatgaggtgatggatgacagatggattctaacagatgagtgataatgagaatatagaaaaacattatagaatatagatggtaggtatgaattctttcagctcttctataagtttaaacattttcataagaaaatagatagaacaaagaaaaaaatttttaattgggttattggcaaacgtatagtactttaggctgaatatggaagcagagtatttggctttactatcctagccaaacagaacagagggagaaataaactacctgagtattcaagacaaagcaaaatgaagcatgagtatctgttcctagtatgcttaagaacccggctaccattattgggttcttcccagtctttcagggatgcaatctttgactatttccagtggtcactgttaagactgaccagctatgctgtgctgatctactcaggcaccattttaaaatcctctgacatgaagattctgaggatagtgagatgcctccaaacaaagtgatacagactttcttcagccaaaaatgagccatcaggcagaaagatctttcaatcagctaaatccaacaggctatgacatcaaggctttctcttggtaatcatgacggacgatggtgttaaattgtgggctggttttgttttctttccaaatggatctcagcaggaaaacttctgagtgacagactaaccatgcttagtttcaaagtaaatgcagctctgaatttaggttcattgattaacaactgaaacaggttgagttccctgaggttgagacacatattcccaaacctttttaaacatttccctagcaaacaagaggggcagataagacaaatccaagataaaaatctctaaagtgagttataaaggaccaataaactattcttccatggcgaccccatgcgaaactgcgcatatggacgtatgaaagactcttaggatacatcagaaaactcagcaaagtgctgggtgttcactgcactaagttttcaacaaacatttatcaattgattggagaagaggtttacagtaactagtcccctaaattaaatttaaggtgcttgaagaatgtaatatcccatgtcaagccaggtaggttttgtctatgaaaaccttcaagcattcacacttctgtccatccctcttcaataggtaggatggtaatgggtacaaaggccagaaacttttctggcaagtgcaaagggggccttcttttaatgaaatcctccctgcaaaattctgggctgcctcttaagaaaggtttgataaaaatgttagtatcttgatgtcattaagtccctaagtattaaaacagccttcttcctagatacattttgctaccattgacaggtggcagtatttattttatttctctattgctccactgtaatggattaagtcctacaagaatatttatgctgggaccatttaaactctagattcttgtttccaagaatagctcgaggcttccccaaattaacatggagactaaaaataaagttgcaggcacaaggtcaggataaaaactggaagtgccatgtgggctaccaaacctagaatccttactactgagagcaggcattgctgtgctgccaggccgtgaagccaccatgttctcagaacagagggctgtgaccttgctgaaatgtgacacacggctttctgctagacaaagctggctgtcatgcaaagcagcgactctcattctgcaagcaggctgagacagcctctccagaaagaggatgtgtctgcaacccgacttggcaaatgagggaggagctcaccagccaaaaggagaagggaggcaaagggaaggcttgagggaggacaagaggaatgtagatacagggcggatccccaggagccactgggaaggaggcaagggcaaggaacctcacaccagggaaaaaccgtcctcctacatcagcccccaccaggccacacctcacccccactcaacaaggaggtcaagctcactggagttctactgcggagtgggggtgacgggaatcttgaacgtccgaatccccacagtacctgccctgctcatggccggcctggcccccttcagtgcacacaatcttttgcctccaaaagggacatattgctgggatgagggaaggctctcggttttgaggagctgtcttctgtgcttatcacgcaggattgaatgcacagcctttaggaaatcctttcggctctctggggagctaggaaaagaagatttacagatgttagagaatcagggcttaacacatggggaacttctaaggttatcaggtgcaaccaaataaatatcccttagggccaaaggctaaagactgaggccttgactccaatttctatgctgagcggtgatttcacgccagtgataaagagcacataactcctttcccttcatgctttgtgatctatctcctggcgctgatgtggggcagagtagcccattaacgaacagatctatggacagtgggagtttgtaccaagaagctgccaaattctgctcctggcactcaaggcagagtttttcattataaaatgtttttgagggcaaatgaaccacaagattcttgcggctctgcagagcacccaaaggccgacgtctcaacgtcctaatgtcctctagagctgagctccctcctggtaaatatcaatggttcccatgacacatttcaacatgtatatattaaggctgtaaagaactataaaatcttcccaagtcctaattctcatggttaaaaaaaaaaaaaaaaagtgcttcctaggaagagttatttttcttattatattcccaatatttttacccaggtaagttttacctggtattccctattaacaataaatacggcatccgtgtaggcagggctactaaaccccatggaccttaccaacaaaatcacaaacagatgagccaaaatagacggtaaaggtggtgctcaaaccccacgaggttatacaaacaacatttcacttatagtcctgacagcttcccggggatctgccttttgttgacctctgtcacccaacacagagagatctgatgtagcaacacaaaacatgggttttgaggttaaacccaccatttattttctttttctttctttttttgacacagagtctcgctctgtcgcccaggctggagtgcagtggtatgatcttggctcattgcaacctccacctcccaggttcaagtgattgtcctgcctcagcctcccaactagctgggattaaaggcacctgccaccaggcatggctaacttttgtatttttagtggagacggggctttgccatgttggccaggctggcctcgaactcctgacctcaagtgatccgcctgccttggcctcccaaagtgctgggattacaggcatgagccaccatgcccagcaccagtgttcattctctataaggccttaggctaagtaccatctctaagccttgcttccccatttgtaaactggagtaagaattgtattaggttggtgcaaaaaataattgcagtttttgccattaaaagtaatggcacttttaattacttttaatggtaaaaactgcagtttctttttgtaccaacctaataccttggtctgactaaatgaaataatgaatgtaaggtgtttagcatagttcatgcttggtaaaggtaccttcttaccatactaacattataaaatattgctaataatcataatattgattctattgtcttttgtaggtaatccatagtatattagtactcactgtgtgaggtactgggtaattactgagtaaatcactgagtatctacgattaaattaaagttagccagacgtggtgctcacgcctgtaatccaagcactgtggcaggccgaggcaggcagaccacgatgtcaggagatcgagaccatcctggctaacatggtgaaaccccgtctctataaaaatacaaaaaattagctgggcatggtggcacatgcctgtagtcccagccactcgggaggctgaggcagcagaatggcatgaacccaggaggcagaggttgcagtgagccgagatcatgccactgcactccagcctgggcgacagagcaaggctctgtttcaataaataaataaataaatatatatataaataaaagcatgattcaatacgggcacatttaaagccaaatatattaaacgccatctgttggagtcatctatcttgtatttttagaaaaataaaagaataggtttcatatgggagaagacctcaaattctcatggcggagggagagaatacaaggaagggcaaaagagggtggcagggtagaagaaaaacaacaagaaataagtagaagcccacatcatgagcccagcttcccctcaagacgtgcaggtgatcaacacaggctgacctccatatgtgctccaaatgatcaggaatcccgataacaccttcacaagctgtcagctcctcccagctgactctccatttactgcatctcagtgatgttacagtacaaacaacgtaccaaacaccagaacacaacgtaagacaccaaaccgttccaatctgcagaaatgtcaacacggcctcgactttacaggcccaggctcacctgcagcacaagtgaaagaccctctccggcctcccttcagactcggattttacatggacaatttcacacacggcatttgcctctgcatctaaagaaattaaaacaacaatgaatcagggtatgtttcaagtggatttatttacatgtttgcaaaagcatttttcagctgtgatagaggattaataatgcagaacactgtataagatcaaagatattttcctactatttcacaatctaaagagatgaagcgactgaaagcttaatggatgcaaagaagagaacacttggaaaatttccagttggtaaaatcttctagatggtctaaaaggtcaatcatatggaccgaactttttttttttttttttcttttttgagatggagtctcattctgtcatccaggccggagtgcggtggtgtgatctcagctcactgcaacctctgcctcccgggttcaagtgattctcctgcctcagcttcctgagtagcagggattacagatgtgcaccccacgcccggctaatttttgtatttttggtagagacagggtttcaccatgttggttaggctggtctcgaactcctgatctcatgatccacccgcctcggcctcccaaagtgctgggattacaagcgtgagccaccgcgcccggcctgaactcactcttccagccatgcagtctggttaactgaactgtgcatttcaattaaatgattaattgttttggcaacagttggactcagtggagccaaagcctcctatgcagatttcatccggccagggatacgacaggtaagcctttgctgtctgttaagggaggcttcccccaggtggctgggcctaaagccctggagacctaattgggtttctcgtccccagcctacccctggagtctgctttgaacacagcagaaaatggtatatcaagaaggtaagggacaattttaaaataattttgaagctctgtagtgcctataatagcacagtactttaagtcatgaataaagtgtttgtgaaaggaacaattcactgcagacattcaggccatacattgtgaagtctcacttttatccagtggttcagaaccctggtcacaaaccctcactgtggttgcatgatttaaccctaaccagaatctatctgcaaaaaattgtacaaactttccaaactaaaataaaaacctagaaattccacgttgtgattctcaaatccactagagtggatttcataatgaaagacatcttgactagcctttataactcaactaaaataagcttttatcttgatggttttaaacttgacttgaatgaaaaatagagagtgagaatggaatgtcgtattacaaagatggctttgtcttcaaaatttgaagtttttatgtgtttactcctcaacgcaggcgaaattcctggcttagaagctgtcagtttgctacagaaataaactttcccatttgtaaacctggcatgaggaaacaaaggaactagataattcataacctacgattctaagtaagactttagtatttaagtgctcaaacctcaaaatgctatgtattgctgccctagactcacaacttacaggtgcctgcaaattcatatataaatcaattttgcaaatcacatcataagtaaaagggcatccggcaaatctctactggaagcttagagagaaaccttctaaaacaaataatcattccaaatatatttgccctacatggtttttgcatttgagttttcctactgtaaggcagaaaaactgtgaaggaagagatgcctcatttaatttggaagagtaactcaaagtgtgcaaaatatggcaagagggttctcctcatgacgttggactagggtgggttggttttctgaggatcagatccagttttactgcttatgacaagtggaaacaaggaggctaaaaaacagaaattggatagtaggaacttgtagatgccaaaagcataaaatagaaattctcttgatcatgcacctgcaggtctctaccaccaaggcttttctttaccaaagctgcacctgctgtccaagtgggacagggaacagatgtggctaaagagtttccatttgactctccagagatgctcattccaggatgtgcctgggagagccacacagtccattcctcctcttgagaacttggcttcaaattaggcccaggatggggagcttctgggtcacagaaatatcacttttcttagtcagtacccctgctactcatgtgtttcaagcatcgtctaattatattatgaagtatacttatagctacccaacaactcacttcactgctatgtggatcacagaaaaagaatcaacatttcaggttgggcatggcagctcacgtctgtaatcccaacactttgggaggccaaggcgggaggcttgcttgagcccaggagttcaagcctagcctgggcaaaatagcaaaaccctatttctacaaaatatttaaaaaattagctggttgtgctggcacatgcctgtagtcccaggtacttggaaaagatagcttgagcctagaaatttgaggctacagtgagctatgatagcaccactgctctccagcctgagcaatggaatgagaccccatctttaaaaaaattaaaatcaatgtaaaaaagaatcaacattttaaaagccttcacactaacagcaaagataaagatttgtaatactttagggaaaaaacatgtgtagtcaatgctttttagtgcttttggtggtatttttggatctctcagttgaaaggcaagtgagtagtttatgtgggctttgtttgctcagtctcaaggattctttcaagaagcacaggctcactgtactcaggtggtagtcactatagtattaatctatagaatagaataactagaatcttttccaggaattttgaagacattacacatccattcactcagttcattcattcacttggttcattcattcattcattcaatatttaatcaatggctgggtaaataagaggcaatagagagaccgagagacaagagagttaagcatagggaaaaaaaaaaaaaaaagacggtagaagagttagaccaagagtgtggattcaaacaaataattcctacacacatcagaaatatgtgtgtgaaatacccagcacaggtgagagtttacctgcactcgccaaagctcgaacctgcagcgcttccgtggggatcatgtgtcgaaatctgaaggggtcccagtcctcataaatggaaagcctgtgagatcctacctgcagaggagaaggaaccagctgcataagaagaatctaacctgccccggaccagttccctgcattttctaaaccagcgacagactctcacgcagtaactctaggcgtgcccaaaggatcttcacccccatgagctcctgtccatccagcaggaagtgagaggctgcgtgataaatacgttgaggggagggtgtgcaaagaagtttgctaagcaaatgcagtgaagagagacacacagagaagaggagaaaaaggatcccaaaagaagaacaggggcaacagagaaggggaaaagtagcgttaggaaggttctgggccatggcagacccaatcaccaattgagtccagttggttccaattcacaaaaatgagaccaattcatgtttgtgctctaaacataagcctgcctgaaaagatggcaggatgagtgatctcaagcatccttagcaatgcttaagaaagaaaaaagatcataaaaaggctcatactgacaaaatggtagaattatgcaggcataactgataagcagatagagaaatagtttcaaaccatggggtaacataagatgtcttacaagtttcttcttctgtttggaaccatctttatacacaaggaccacagcagttttgaagactggaaaaaataaaataaagacagttatggtatgtcatgtgtagggttttccccttgacatcaccaacttgtggtaataaacactacagttatgaagaggacgttgagatcccagttaactgactcccacccaccttccattcattcatcacatctgtgaaaatcaaaagcctattgagacacaagtttccaggttcaaaataaacatagaaagcctacataaatggaattaacctatggcccaaaaaacttttgcgtaaaatatgttaggtatgatacaatttcaaggttaaaacttcagctgatacatattcaacaaaaatgtactaattcagtagatggaggaataatataaacgtctttcacaataacaatgcaattgctgaagatgatttacatttatgcaaattaaggtaatagtgcacatagacagtgataatttaggaaatataactcatcttttgacctaaagaaacaaaaatgagtttatgaaatagaattcaactgtatgtcttccagaatgactgaatcaggtaagctctctaggagtggtaaacatgtagtttcattcttatattctttcgggggtggggagatacaatggagttatgcataatcttccagagaatttgttaagcaatgccaagcacatttaacctgcagtgattctgattcttcctagaagggtaagtagagttggcacccagaaggaatagaagggtgactgactcctgcctgtcctttgttctctgtgtcagcgtctctgctatggtccaaatgtttgtgtttccccaaaattcataccttgaaactaatcacccttgtgatggtttcaggaggtgggcctttgagaagtgatcaggccctgaggactctgtcctcatgaatgggatgagtgtccttataagagacttgagagagatgccttgaccctttcgccatatgaagccacagctaggaagtaggagaaagcaggatcttggacttccagcctccacaactgtgagaaataaatctctgttgtttggaagctggccactttatggtattttgttatagcagcccaaatggactaagatagtctccattatcccttcatactgaccccaaggaatagcccagtcacacagcggctgaaggaggcacagccttgtacaccagacacagaattacaaaaggaacaaacattcagagaattctcagggatgggccaccaggctcacaggccctttggaggccaactggaagtatctggttcaatttctatcctacggagggcaggtcggtcttgtctcctctttgtgtaagatcatgctaatctccactgcagggaaataagcgctgagatgcaaagaaactgactccagccactcggtctagactgcccatagcccttcacacctcacagcatctgacccctcaaggttcccagagcacagactggcaggttccccacaaaggttcacactgacccgaggaggccacaccagctcttcacagcagctgagcacaagcaacctgagaaggccttttattcccactatgaagccttcagaaatcagagaggctgggacagctaggtcctcttagaaatgaaagagctctaccccaatgactctaatctcagaagcgccaccatgccactgggaccacagctcaatgctatgattccctcgatttccctcaatcttaaccattgtggatcacagcaggagggccagaaagtgagcttcagcctggcaccgggacctcagcctctcccttaaactttccctaatcctcggagctagtgttactcaagtgactccacagtgttgcccgatcccttcagacatggccttgatgatctccaaaactcatgctacctttgccagcctaaagcatccactctgtgccccaaaacgtgaatgtcaaatacccttcaaggcagaaggctatttctatttttgtttgtttctgtttaaggcaacaatcaccaacatttggtacacatgagccatcctgtgaaacatcaaggcgcttcgttggcagcaagtcaacttcggtttcagaagaaagctgcactatttcctgaggttagaggtttaaaccaaaacaagacaaccacattttaaccccaaatctgccgactgagggtaaccatgatccttccttcacagcacctcttccttatttcaactccttgctcagcctttctgctagttctgccttgctacttgaaatcacacccaaaccatcaaacttgtctctttaacggctgggaatccacagaagctcatcatgactacagcctttgttcataatcccaattttaatccttccccttctctttcctattactctggagaggattctgaataatgataaacacgtcttgtacctcagagccttcagtttttctcttatgaactacagcccctattgagtttgctgacagtgtgatgcccatgaagctggagtatgcagtctccatttacaccagggacaggtgctgtgggcccgccttcctggagacagcacccacaccgacttctcataaacagcccaggaggcagggaacagagtaatgtagagtccactatcggagcctgtgcagaaagtggtacctaaatccccaacctcaaaaccagcattttcctgaatcacttacaccatgggttggcaaacaagggccctcaggccagacccaggcctgctgccacctgtgtggtgcagctgctgatccagccatctcattcatttacatgttatctagggctgcttctggctccagtggcaaagcatgtggcctcttggcccaaagcctaaaatgtactatgtagcctttaacagaaaagagggtcgggcgcggtggctcatacctgtaatcccagcactttgggaggccgaggcgggcagattacaaggtcaagagattgagaccatcttggccaacatggtgaaactccatctctactaaaaacacaaaaattagctgggcgtggtggtgcgtgcctgtagtcccagctactcgggagactgagacaggacaatcgcttgaacctgggaggcagaggttgcagtgagccgagaacgcaccattgcactccagcctggcaacacagcgagactccatccccccagaaaaaccaaaaaaacaaaacaaaacgaaacagaaaagagtttgccaacccattttctcctacttaaattattttcttattctaaatctcttgatttctaactacagtgaatctgtaaaactgagggcaaagccatgaaaaatctaaatgttgacctctatgactgctagtctgtagtcccacatcactgtgtgggtcatttacatcaatatcctgcatcccatgaatgacccattaagcagcatccaggagatcccagactcctccaagaagaaatcactatagaagaaacacaagtggtgatgttgaaaagaaagcaaatactacttcccccctcccccaaaacacctaccccatcaaaaactaacaacttgttaaaatacccccaatattcctttgaatggcctatttagtcacatgctttctctgcacttacatttgttttgttttgtttttttgagacagagtcttgctctgtcacccaggctggagtccagtggaacgatctcagctcactacaacctctgcctccagggttcaagcgattctcctgccttagcctcccaagtagctgggattacaggcacctgccaccacatccagctaatttttgtatttttagtaaggacggggtttcaccatattagccaggctagtcttgaactcctgacctcaagtgatccgtccaccttggcctcccaaagtgctgggattacaggtgtgagccaccacacctggcctcctttgttatttttaatgaaatgacctcaacagctacaggggctctttggaaattttgggaatattagtaacttttcaatgaaggctaagtcattgaaatacaaagtccaatggatctttgcattaaatactttgattttaaaatcactaggacattccatttggggatactttgttcacatcatggaggaaaaaaaaaagtttagttaagaaggagaaagcaacctccgttcccagcaagcccacaaaaataatataaggcaagagaataaggcagatttccattatattatgttcctacccatgagtcttttagcaagaggctaggacaaaacgcaacctaaaacaaaagcatggagtgttgatagttttatattcatgaacaacacagcaatatgccaataagcatttacattgcaacaacaagctatgtttcctaaattatatgctaacccatgttttttctctctctcaaaaagcatattacaatacaatcacatgagatctctaattgcagcaactgcatccatctaaactggtttattaaaaaataagtcattcgcaaacatctctaatttcactagtattgagtggcaatgcgattgggatgcacctcacagctgatccaggcactccagagttgccacaacagctcagctgagaaccagcatcctaaatcctggccttaagaccaaacagcaacaaagtcaggaagcaaataaaagatctaggactggggggtctcagaaacagaggccattttgtcttgatttttcactttatttttccttggtttataattaacccattattttgaaaagacacgcagagcagcagccaaaaaaaaaaaaattcttttcctgcctctgtgtttatgtctgggatagacttgggcacagccatttccgcccacccatgtggctgagtgaccacatagggcaatttaactcgaaggtttcatttagtgtttgtgagatgttggtggctacggcaggaagaccgattcaagtaactgcaattaactttatttttaatcaattgggtcttgaaaaagaaatgttcttgttttgaaaactaagctagacttttccccctccataaaacgcttttctgatacacaccgaatgctgccaactctggttcctttttccacttgcccagcgaggccggcgggttcagccagatcacggtagtgtgcaaaagcaggtctcccatgctcagatctgcaacctgaaagccagagacgtgacaaagcttactgggtggtgttatcaatactcagattttcatgatgtttgaaaattcagcatgctgatattaattttacttcaagaaaatactgctcctaaaaacatttgcttaaatatgtgagataatgctaagttaaactgctggatttagccattccacaatgtaacatatcaaaacatcatgttgtacaccataaatatataaaatttttacttgtcaatttcatgtttttgagaaaagaaatcgcaccaaaatgacagactacattttttaaaaatattttcgatttgtgactgtctcaataaacaccacctcccatcaaaacaggctgaagatacaatatccagttaacctttccaatgggaaataatagtatcattatgttctagccaagtttgagctaggaacaatacaatgaaattttaacgaaaaaaaaaatcctttaattcatatgaaatctcctaattgaaaaataaatcctctccattcccaaagaaacacatggaatacaggggagagaaaaggctcatcttttttttccccatttattccatgcttgtctactagaatttcagaaaaggatggcaaataggtacaaactggggctctgaaattcacatgcagttagtctgtcaaaactgatctacaaaactggagatgttttgtgttcagagacagtttcccaaggagatgctaatggccgtccatgacaaagatccacccccagataactgcagacatttccaccagtgaatatccacttttgggaaatgtaggcaaattatttcttcttccaatccatttcaaagacgactttatttcactttagatgagggagagagaagccaataaagagtttgaagattcctctattggcacaggcagcgtgaatgctggaatcccaagagaccatgaggtttagtcgctcacccccagcggtcacacgctaaactgtctccgacagacaagtgctggttgcagagccatctagacacgatgatccagagagtctgatgcaagttcaacgtctatgcctcacaacagtcccgtctgcttttctcactgcagtcactggcctccttccaaatctagctgggtttcctatacagcagcaacctggcgacccgccactgaacacagtgcagtttggattgcccttctcgagccaccaaaacaggctaccgtgctgagatgtggctccagcagtacaggatacagaggtattgttgcctcccttgattgaaattattataatcatcactgtcattattactaagctatagtaccattagtacaatcaagggttaaaataatttttaagcagccatattattttgtctatagatattaagtaactcatcaaccaaacccccaggatatgatcagccaaggtaatgacatagtctccactacctatcccccgaagacccacatagaagaggaggagttacatacaaaagacaaattcccagaggccacagcccctgggagtacgtctttaaaagtgattaaaggccaacatggtagactgtccaaactctacttcttccaacagaattacattatctgcaccttctgccatgtgattttccagcacctcccactagactaggcagggtacacacatcgccgcccggatgactttgggtgtaggcatgtgacttagagcccaccttccagccatgggaaggacttgcccaagacagccattgctgcttcagcctggatcctggaaggaagagacaaggagcacaccagaaccttcagaactggagctaaccaagagaaaccaaaccttggttgacctacaaagccacatacgagataaatatctgttgtagagaaccactgagatttccagttatttgttacacaactgaaaatgggctgatgctgttcctgtgcacagggtttttctctggacaagcttcccagggcaagtggactagggggtcagggtgctccctctggccacagcctctctctggggcttccactggttcccttctgaatcctcctcccaaaccccaagaaagagttctgctgggaggcctccaccttactaaggactgggatgcccgactgagtcagcatttttaaggacttcttttaaggggaaatgccctcttgcattcttcttcctcctagttaagcaaaagggatttcttagcctaactccccagagtttaacatgggggtaggaggttgaaggcccagtttcatcaaaaagctgtttctttgccagctttgttctctgtgaacctatttgccttcagagatatcttaaggaatgttggttgaagacccaattcaggtaccttgtgttcctagaatgttaccattttacaataaacctgctgttaccagcagatactgataaatgttcctattcctctttacaaacttcatcaatccattctaggctgttacttcacattgccactaagagggaaccacaaggatcaggaattacttttgtgaaaatctgaatataatttgggtacctccacaatcacccgcctgagtctccgtaattcttccaatatactgctgagagcagtggaacagaattgtcattgatcttggcacagaccatcctatttcccaagactcattctccctagggttttgttcttacggcattgaggctgctgcatcctttccagtttaaaggccattctcctcaatggaagaaaaagagatgaaatggggcttaagacttgagtaaaaccaactgccttggagtaattgattcccactgggggtctatttcctgctcgtttgtcttatccttccacaacaatatcttctcttgctctctttggcatcttttccaagccagaaattttctgggctttgcacctcctggtaaaagtaggattttcctcctcttcagtcctggtactcagccagtgtccctccttccatcttttgcacatttctttttacaatctcagcccacaaaaaatactttgtatagcactatatcactttgttcctcactggaaagatttcttacatatcagaatttcattttaaaggacttccaggttcactgaagccatattcccttttacagtctctgacttctgatcatattcatctttttttcctaaattctttgcaacccaatatccatttcgccttctaatctttagcatcatggtcatttgctcctaaggtcattacaatctaataattaatttggcatataaagaaaatgtaatatgacgtaatgaaaatgttcatttccatggcccagtaaaatgcacttctgtcagaatgaaataaaccaaaggatgggaggacttcttataataaaaaaaagtttacagtattattcatattagtcaataacaaaaagcattaaaattctgtgatcaacataaaatcaaggtataaaattaccttcaagatataactaaacatatacatagatattaatttaaaacaatcaaaatcaacaccaaaatatggtaagttctatgtcttgaaaccatagttttcttcttgcctttttctgtattttgccctcttctttaataagcataatttttttcttcttataaagttttataagaaagtgagagctaagtccagggtggcaaccttcatcttttctatactctgatagattaaattacctgccaagtagtctcagaacattctcatgctctgcttgtaatgttatgtaaaaacaaaattgtgttgcagttgaaaactacatatcctctacagcagaccttcctgggctatcagatcctgactgtacactgtctttgagagcctgtgcgattctttgtaaagtgtaggtaacagacagatgtgtaaattctgtccagtctgatactggcctagctgatttcctccagctgtggaaaaaccagtttgtctcatttacaattcacctcaacatttcttcactccatatgtaaacttctgtgattgtgatttttccaatgaacctttacaacacctgcctgggtccttcacatcttatgagtaaaataaattatgagaggtcataattttacctctttcagaaaattatcctttaacagcctgaaaacttgttttgtttcattaaggacaaaaaaatgagcctggataatggcctttagtatctctggagataaggtgctttctctagcctacactaaacaaccaaactttgccccacccacactgcttttaaccctgctgctagtcacagcaagagtgtttttcctctaggttccttcccacattttctcttttttaaggtggaaagaaaaactgagtctaatctctagttgaatttgagcatacagaggcattgacgaatgttactatatatcatatccctatgattcctctaagtattattggcattttgtaattgaaaaataataattgtatgtattcaggggtacacagtaatgctttgatatatgtactgtataacccatcagatcagagcaattaacttatccatcatctcaaacatctaccactcctctgtgttggcaacatacttttattcaggtaagtgcatgttaatgactcaggcacaacttttagctcaccttaagtctttctcaggtgtatctgttcctgccactgctcttctaagtaggtttttgggtagatttaactgattcagagtcatttgaaattttcattcctttgacaactattttttgggcacccactatgtgcctggtgtcattctaatctctggaggtagagccttggactttcatgacatttctagaaacagcccagattgtggtaatggaagttcactttcacacttaacacagaataaagccagagatccccagggtgaggagctgaacatcaggaaaacatttcctacaggaagaaatagtccagctgaggaagaaaattcacattgcagccttggataaagcacagatgttccactaagaaaaacaacagcatcctaactattttacttacaagtaacacctttttaaaaaataaataaataaataaaagcaaactcaaactcggctttcctgacagatgtcctgagaagatggggaccctcacctcttttttctcaccagtctgttcagcaatcagctggtcaaacacagccccaaactcttcatggattttctgcatctcattgatgtgactggcaaccttgttcatggtcttgatggccactggaagaaaacaggttgtgaaatgagaggctatttagagaccctcatggagactcaggcctgccgggggtcccaggccgaggcctaccgtccaggtggtagtgctcctcgctctccgcatcggtcagggcgaacagctccctgagcagaagtgggtacttgaggatcctctggatgggcttgatgaggtacgactccagcgtggatgagtgctgctgcttcgggttctgggcatccaagaatgccttgaaagccgtgtctgtcttggctggcagggtttaaacacaggtcatgggggtggaacgcccacgtgactcccttcccacaatttccctcccttcctcagtgactccaaggtgcctttttgcaggactgagcagagagtgggtggcaggaagagggacaggtaggggagggggcagtcagggagaccacaggcagtcagatctatgtatttatgtgttgggggtggggtggggagaagcctgatgagttaaaggatgacggagtgtagactgcagacacccggatttccagcggctgctctttatcctcctcctattacacatgtttttttatcctgatgttttgacacctggggccttactgtccatggggagactgccccgcccacgctggccagttcctggagatagtaaaagacttgccaggaaatgtgccttttatagagtccccacacactgccacctcctgtctgaggctcttacaccctgggccaccattcccctgtcctaatcatctcagggtggggagcacacatctcggcttcgagtgcaccacagagcccggcctccccagttccttccctcagaaaccccaagaaaggctcttggccacattttcccctcgctccctctgcctcctgacactgcatgtcctcatctggcccgcatggcatggggtgcccctgcctcttgggaactgtgagtgacaaactaataatcatccgtcccctgagctgttggccctgtcatcccaaaataatgataaacctacattctgaacactccttaccctggttttcctaatctttcaagcatttcactgctggaaaaacctcttttgaaaaaggcaagcatgccgtgcacagtggctcatgaatgtaatcctagcagtttgggaggcagaggcgagcggatcacttgaggtcaggagtttgaaagcagcctggccaacctgctaaaatctcatctctactaaaaatacaaaaaaaaaaaaaaaaaaaaaagccaggctggtggcaggcgcccataatcccagctactcaggaggtggaggcaggagaatcacttgaacctgggaggcggaggttgcagtgagccgagatcgtgccactgcactccagcctgagtgacagagggagactccgtctcaaaaaaaaaaaaaaaagaaagaaaaaaagaaaaagaaaaagaaaaaaaaggcaagcagatgcagaagcagcagcatctcgcagtgccagtgaagcagagcaaggcaggatctcccacggtgatctactcaaagttaactcggtggcaccacctgtgggcatccgtgggctctgatctgatgcagctcaggcagcactttcctcaccagccttgcctccttcctcagtgtcccagctggtttgggaagcagccctggggagttgtgggaccccaaacagaggtacctggcaggggatgatacgaagccgtggctaatgtcttccaggtgcaaaggaatgtcaggggagggcaaaatatgggaagaggaggggacagtgtatccaagcaacgtaacagtggacacacgctgcctctgggctggtgagcacctgggggtgatgggggctgtggcacgtccagcgtgggcactctggacgtttccagtgtggaaactccacacacccctcccccatacctcgcccagtcacctctccatttggctattcctgagcagcatcctttatgataaaccagtaaatgaacacaatcaacattggaaaaagcacattcttcacattcatctggatgactttcccccattggaaattcatttccaatgaatattcatctggatgactttcccccactggaaatttaacatggcactccagtgactcgatacttttcataacagcacctggaatgtcacaggaactcaaaaatctcttcaataaataaataccctctccccgcaaaaaacagtgggagtgtatatataatttttatatatatatatacacacacacacacgtatattttattagaaagtttaaaatatagaaatttaaaagtttaatgatatatattttttattagaaagcttaaaatacaaaaatttaaaagtttaatgatatttatagattttattagaaagtttaaaatatataaacattaaacttttaaaatgtctaataaaaatgtctttccatccccagtggttaggggtatgagctaagactaaagatgctataaaagggcatcagaacatgattcttctgtcttttttttttttttctgagacggagtctcgatctgttgcccaggctagagtgcgatggcacactgtggatcactgcaacctctacctcccgagttcaagcaattgtcctgcctcagcctcccgagtagctgggactacaggcatgcaccatcaggtctggctaattttttttttttgtatttttagtagagacggagtttcaccatgttggtcaggttggtctcgaactcctgacctcaaacgatctgcccacctcggcctcccaaagggctgggattataggtgtgagccaccgcacccagccctgtctttaattttaaaacacagcaatcatgggggaagacctcataagaccacaatcttgttatcccttttaagccccattaagagaacagactccctgggttggcatcatttcttgtctttccaaagcacaaaatcctgaagagaaaggacactgggaagagtggccgactggccccatgtgacaggagagctgggccgggctgggggccagcatatgtggaactgatggattttgtggggcatcccaagtctagggccacatctagaaggacctaggaactcttccccaacaaaatattctcgtccaaaaatatggctgtgggtatttcacccatcgactgaattccatatcagagcaaaagactgcacagttcacagcgcttggcgcagtccaggagcgtcactcctccaggccagctgtgagtccgcgatgaacatgaacatgcactttgttgttctcagagttatcctgacactctgggctcattagacaattagaaaatatgggtcagctgggcatggtggatcacacctgtaatccgagcactccgggaagccaaggcgggcagatcacctgaggtcaggagttcaagaccagcctggccaacatggtgagacccccgtctctactaaaaatacaaaaattagctgggcatggtggcgtgcacctgtaatcccagctattcaggaggctgaggcaggataatcacttgaacctgggaggcagaggttgcagtgagccgagatcacaccactgcgctccagcctgggtgacagagtgagactccatctcagaaaaaaaaaaaaaaaaaaaaaagaaaagaaaagaaaaatatgggtcattcccactgttttaagggatagttttgaaagataatataatatttttcttattgaattaagaaaaaatccatgggggcagaatttaatctaattgagtgattaaaaataacacaaattgctcaagggcagagatgggtatataatttcactgtggagcaaagcactctaaaattgttactttaacaatctcgtaacaattagcattcaataaaggttttaaaagaaacacactgcacacacagagccatatgcccaacacagcacacgggaaaggtcaggcagcatgacaaggagaatcccaggtccccttttcatttgaggttccaccagaactctgttgcacagaccaccactaccgttaagactgtttttatctggggcaggctctttgttacccagagatctgtattgtgctaatacttcctataataggttttaaattaagtcaagctagttctctttggcagcaaacataaacacaagaacattatttacatatccggggacctgatcagcagctgtttacttggcagctacagtgaagtgttaaggaacagcaagctgatttccagagattctttaaaatcaaactttctgttggtgcaactgtttgccaagaaaatgtttccttaatccttttaccatcaaaaaccaccatatgctgaactatggcgacataaccactttctggagactctcagaatgttccaccgtcttctcagagcacttaaggaaaagcagcttgcccatataaaaattctactgtgtcctgcacaaaaataactacaaatgcagcagttttcaaggataactgagacaactttagaagtgcttttgggagctgttatcacactcccaggaacaaaagtaggtgaaggaaagataaaattccacaaaaaggtatacggtaagtcctcacttaatgtagtcagtaagttcttggaaactgcaactttatgcaaaatgacatacaatgaaaccaatttttttcctcatcaacattataacaaaatgatgttgaacaaaatgacattagttgggaacctgctgtacatcgtgtcacttaaaagtcacagtttccaagaacctgtcgacaacgtgaagtgaggacttagttatgaagtgtggtaggttataatcgaaattaaagaaaaacagaaataaagcagggaatttctaaaccccctacgtttttacataactgcaaaatgacccatcaattctggccccaaatagcaaggtaaaactttcattacaagaaaattgacaaaaccattaattcaagatattggccaggtaatcctagcactgtaggaggccgaggtgggcggatcacctgaggtcaggaattcaagaccagcctggccaacatggtgaaaccccatctctaccaaaaaatacaaaaattagccaggtgtggtggcaggggcctgtagtcccagctactcaggaggctgaggcagaagaatcgcttgacctgggaggtggaggttccagcccaagtgacagagcaaggctctgtgtcaaaaaaaaaaaaaaaaaaaaaacaaggcagggagcagtggctcacgcctgtaatcccagcactttgggaggtcgaggcgggtggatcacctgaggtcaggagttcgagaccagcctggccaacgtggcgaaactccatctctgctaaaaatacaaaaattagccaggtgtggtggtgcacgcctgtaatcccagctactcgggaggctgaggcaggagaatcacttgaacctgggaggcagaggtcgcagtgagccaagatcgtgccactgcactccagcctgggcaacagagtgagactctgtctcaaaaaaaaaaaaaatgaaaaaaaaatgaatacattacattgctcagcacccatatcagtggcttgctggaacatctatctggcaaccaatgactcttagatttctgcccaaaagcccccaaccactgtcagccacacaactgacaagcaacacacccccacctccacatcctcagaggccttacctttcaccaggaccttgggaacttttgtgtggctggcgcagaaggcactgtagagcttgaagcggtcagcataatacaggaatgatccccccagagagaacagcactttctggatttgacgagaaaaggcacagttggttgtttccttcctccactggaaatatcagcaggttatggcagggagctcacatctgcctggcccaccccacaaatcaacatcttccgtgcctgtcagagcctttctttgctatcaaatgccctaaaattgcccattacaaagtatgtgcttgtacaagtttgtgtaaaaggtgttggactttttgtcttcttagtatttatagggtagatgtccctggttttccaggtctgtgtcttttaataacctatccgggctgtttgaatgttgatgagaaagtatatactttggaaaagtcagaaatctcaattctctcattagctcctgttggcaaactaaataaaggcaggaaatgctcatacctcccgcccccgaagcagaaaacatgttcctctgatcactatcttcatgccttccaaaaccaccttctcctctagcaactaagaacataagcaatattaaaggaagaaacacgctcaactatggaagtcaggtatcatctccccagcctctctgccctgtcccagtaggatcacaactgggtagaggccttctcattaagattttactatgcctgagaagatactttgtatcccacacattatatatagagatatgttatatgtaaatatataatatatagatatatataaatatatattctataaaatatatattttatataatatataaaatatataatatataaaaatatataatatataattaatatattatattaatatattatattaaaatatatatatatatatatggcctcagaaaaacaccttctgtttcacactgaaagagtcttgtttagagagggaccttatttagcttattgaggcttagaattaaaaggcagggttcaagcaaagaaataaggttttgaatttgagtaacaaactaggttccccaaagtgcaatttatctaatgaacaatgcagaggattctgagtctgtccatgaccaaaaaaaaaaaaaaaaaaaaaaaaggtttattttaaaccatacataattggtaattagatgcctcactactcttcttacgtgttctccttttcctcctttactttccaagccctccgcaaatctccaccctggcttggagggtgtcagcaggagtaccctgggtactgccatcggactctgtgagggagttatccttggagcctgatatggtttggctgtgtcctcactcaaatctcaccttgaattgtagctcccataatccccatatgttgtgagaggtaactgaataatggaggcaggtttttcctgtgctgttctcatgatagcgaataagtctcaggagatctgatggtttttataaagggcggttcccctgcacacgctctcttgcctgccgccatgtaagatgtgactttgctcctcctgaggcctccccagccatgagggactgtgagtccattaaacctctttttctttacaaattacccaatctcaggtatttcttcatagcaatgtgaaaatgaactaatacagagtcatacccaagaattaagcaaaaaaagttgtggaagaaaatgtgctaaatgtaacccctccctttagccatcctaaagccattcatttatttaacttaatatttactgtttatttaccctaccataaccacagatgaaacactaaggtattcacttattcctcccgccttaaaaattgattctcagggaacaatgtgcacacaaatatgagggtttatacacaaagactccacttccccaatgtttctgttctgtaggacttcagaacgcttctcacaggctgacgtacattgcaaatttccaaatgaaaattttatcaaaacttatttgacatcagaactaattatttccttctgatactaccttgagactagtgctctatgcaacacagtttgaagattttaacaagtttttctttttcttttttttttggtcaaatatacaatgaggagtttaaaaagagcagcaattgtggaaatcagcagcaacaggtttgggagcaaatctggaaaccaactcagagagcctggagagaatcctgcaggcaggcacactagtgttcatgagccatctcaccttacagatggaatggagacaatcagattgtgccataaacagcaaagtgaaggtatatgaagagggtcccacttatgtggaattgagaagagtgatggttgagtatggaagtaccggtttggtatccttgatccaaaatacttgtgaccagaagtacttcagatttcatattttttcatatttgggaatatctgcattatatttactggttgagcatcaaaaatcgaaaatccagaatgctccaatggccatttccttagagcaacatgttggcactcaaaaagtttccaattttagagcagtttggatttcagattttcagatttgagatgctccacctgtcactaaaagaagcaatgtacctgcctctccctagaataacactgctctcagtacactcaagtctatatcaaagttctggtacccaaagtctcctttttgtgaatctttttagtgattaactggacccaaactcaaagaaccagccccacagcaaaagacttgtaaatgaatataatgaatgttagctactttaggttaaaacgtagtattttaaagtatgtctataaccatattttaaccaaccctggcctccagaatatatccatttttattaagcagcttttttgtttatctaactaccaggccacattatgtgttctactgtgcaaattatcaatttactaatttagaaaacaggtatcactacaatgaacctaacttatttcaaatgaagagcataaccaccaacaagcaatttttgaacacaaaaatgaactatatggagtatttagggtgaaagatatattattgtgcctacaactttctcttaaatggttttggaagaaaatattttatatgtacacatagacacaccatacatgcataatgtacacacatgcacatatggatacatatacacataggagacagggagggaaagaaagaataaagcaaatgtagcccaatgctaccatttggggaatctagatgaagggtattcaggaattctctgcactattcttgtaacttttctgtaagtctgaaattatacccaaacaaaaatgaacacctataatatatacatatatattcacatacttatgtgtgtttgtatgtaattcttagtagctcctgttgcagagaggcaatgtaaagagataacacatacacaaaaaaacatatattgaggtagaatatcgaggtgaggcagtctttaccccggctccaaaacttgtaccctaacattacacagctagattcctgcaagtgttagaaggcaggcaaagtgtatgggggcctatacacatatgaacagctcattcttaacacaaatgcaaaagaaattgagtggaaaaaggatcaaacgacagccattgcaacaaacaggattagaaaaattggatattcatacacacacaaattaactttgattcctacattaaaccataacaaatttaagttcaaatagatcagaagtctaaatgtaaaactataaaacttctaagagaaaactacaaaacttctaagagtaaacacaggaaaaaatctttaggcaaagatttcatagataagacaccaaaagtgtgattcaaaaagggaaaatttgaaaaactgtacttcatcaaaattaaaaacttctgctctgtgaagggcactgtcaagaaaatgaaaagatgggcctcaaatacagaaaaaaatatttacaaatcatgtatctgataaaggacttataaaggatatacaaagaactctcaaaactcaatattagtaaacaaataacccagtaaaataaatgagcaaattatttgaacaaacacttcaccaaggtggatatactgagggcaaaaaacaagcacataacagaagacgctcatcatcgtaagtcattagggaaattaaaattagaaccataatgagctgctactacacacctgttagaatagctaaaaagagaaagtgactgtgacctcagcagaacaatgaggaggaactgctggagggagctgcaatggtataaccactttgtaaaacagttgagcagtttcttaaaaagttaaacatacccttaccatatgacccaaccattcccttcctgggtacttaagagaaatgagagcatatatccatactaaaacttgtacacatatgttcacagcagctttatttgtaattaccaaaaactggaaacaacccaaatgcccaagaaaggtgaatggataacaaagtgtggtctatccattcaatggaagacaatgcagcaatgaaaagggatgagctcttgatacacacagcaatatggacggatctcagtacaactacgctgagtggaagcagccccagaaaaacgggtacttggtatgggattccaccaatataaaattccagaatgcaaacatatttaacataacagggagcagagcatggagcaggggtagagtgggagggcagtaagaggcagaagagaaaaaccacaaaagggcaggacaagactttcaggagaaatgattatgtgcattgtcctgattgtgacgatggtttcataggggtgtgtgtgtgtgaattcatcaaattccacactaagtatatgcagcatattctactgcacaattataccccaattaatctgttaaagcacatgagggtgacacgtaagccaacacatgaagcaatgtgctttgttaattggaggtgcaacacaggaaatctgcaataaaagaaagccaagcaggggagaggaaataagcatccttgctaaggcactagtcataaatcctcattaggctgcaaggacaccgtgtgctggaagattgtctttcccctggataatgataagcatttccattaagcaaagtttcccagaacacgataaattaatttgtttactgggtaaccagaagtgccttttttttttttttttttttttttttgtaagacggagcctcgttcttgtcccccagactggagagcagtgctgcaatctcggctcactgcaacctctgcatctcaggttcaagcgattctcctgcctcagcctcctgagtagctggaattacaggtgcccaccaccatgcccagctaatttttatactttttgtagagatgggattttgccacgttggccaggctggtctcaaactcctgacctcaggtgatctgcccgccttggcctcccaaagtgctgggattacaggcgtgagccaccatgcccagccaggagtgcctattctaattcactgatagctaaagcattaaaggcccccacataaaccaaacaaaaggtcaaggttggtacttcttctcacgtaaaagccagcagctgcaccagtttaatgcaaattgatggcattgggcttcccttagccagaccagcaagacacactccattcccctccctctcagacacccttaggaacagaccccactgtggccctccaatgaagacatcaacacgatcaggggattcaacttgagccacactatagccctgacgctggaggcagctttgcactatttaccttaaattgatcaaccttctcaagcttttccaaatcaggtaccagtctcactccatcttctagagttttaaggaattctacttgaaactctaccatttccgttaaatttccaaaaagcacgtcaagctagaaataaaacagaatttaatgcacctcatatctcattagtcttcctaaacgttatttatatctgattacaaggtttttctatcaattcttatcaattaagagaataatcccactaccagagagcggggcagttttttactcttcatgagcacaccaaagcttagcaggcaataatttcagctagttacaattaaataaatttaaaatgttttcagtgttacgcatgtccccatttttcctctttaccaacaagtcaaaccacggtatgatggtcacaaagttgaaaccatttccagcatacctcatcctgggtgagaaaagtttctttttgaagaggctttaggtatctctccataagacagtttaaatcctaagaattgaaaagagaactcattagcttatgtgttttattttttatataccctagaacttaaagtataaagcatatgttaatgtctataaaaggatctagaagagaacaaacagatcctgtcccgaaggctaacgttagagactttaggtcgttaaggtccatttcatgcaggagtaagccaaccttttctgtcaatattttaggcttcgaggactaaaatacggtctccattgcaacttcttcaactgtagcacccaagcaggcatagacaatatgtcaaggaatgagcgtggctgtgttctcatcaaactttatttgcgaaaacaggcagcgagctggatttgacctgagagccgtcgtttgctaacccctgatttaaaagactaagatatagatacttaaacagatcaccctgctttcgcataggaaatgtgaccaggtgtcagaacaagtgataacacaaagacaacagacctggcagtcttctggctagattctaattagattatgaagatcataccctcaacttttaaaaaaattaaatgtagctttcttattaggtcaacaacacatacatatatatatatatataaatgaattgccgtgaaaatcactaggcttccttaaaaatcacaagaaggctgggcgtggtagctctcacgcctatagtcccagtactttgggaggccaaggtgggaggatcgcttgagcccatgagttcgaaaccagcatgggcaacatggtgaaacctcctctctacaaaaaaaaacagaaaacggggctgggcatggtggcatgcacctgtggtcccagctactcaggaggctgaggagggaggattacttgagcgcaggaagtaaaggctgcagtgagctatgatcacaccactgtactccagcctggccaacagagtgagactatcttaaaaaaacaaaaaaaacaactcaaaacaagcttttaacattcagagtataggcaaaattccaggagaaaccaagacgctcttcatgaacacagtttaaatcagctgttaatgaaaaccagcagacacaccaacttcactcctttacgaggcagagggagggcagggggagaaaaaagaaacataccttcacgtaggtgcgctccgtctccaggagctcgcagatcaccttgcgcagcttatctgcatccgagagttgtctcatggtcgccagctgaggccccgtggagtcctgaggagatgggctctggtcagaggggttcatctcatgcaaactgcggcaaaatgcggccacctgttctgtactcttcggagcacaggggggaagggaaggcagaggtcattatccctcattagacgcacctgacacctggaccgcctagaggtgttctccctggttagtcaactgtcacatatgaatgtcgtcttgtgtttccacaaattgctccacatttaggagagcttcttgaatgctcataacaaccaggataacaattgctaacatacactcatcgcttaccacacgcctagtgccggtctaatgcatttcatctgcccacacggtaaggacaacggaagcccagaggggttaagtaactcatccaagatgatgcagtacgtaagtggcagagctgggatttgaaccaggcaatctggtttcaaagcctatggatcttaaccactccccaagcaagaagtcgataaatcaggagacataaaagttagctgcatttcacccaaggtacaagcctcattaattatcagactcccagttcagtaaactatctactttgcaatgttgcaaagatgattttacaagctaaggttcttcctgttaaaaatggacactgagtcaactttctagattaagaaagatacccatacttaaataaaagtttctccctctccagcttctccaaaggcaaaaagataccactcccctttaagaataacgagattagccctaaaataggcctcaatgggagatcccagtctccacatctaccagggatgaatcaggtgtagaccataaaggttgcacacgttttgtcatccatttgaaacgtaggattccaggattctaaaattccaactcttccagttacacaaacagttctccaaagcaagggctgctgtaaaaacccatgagaccagtagttttccaacttggctgcttatgagaatcactggggagcttttcaacctcccgatgcccatgcacaccagagatcaatttcatcagaatctctggggtgggatatgcagatatcaatatgttttaaagctctctgtgtaattgctctagaggctatgtagtagcacaaaatttaattcactaatatttgttccaaagcaccactcaatgaatgtttgatggaaattttcttactttttttttttttgagacggagtctcgctctgtcacccaggctggagtgcagtggtgcgatctcagctcacagcaagctccaccttccgggttcacgccattctcctgcctcagcctcccgagcagctgggactacaggcgcccgccaccacgcccggctatttttttgtatttttaggagagacgggatttcaacatgttggccaggatggtctcaatctgaccttgtgatccacccgccttggcctcccaaagtgctgggattacaggcgtgagccaccgcgcccggccccggaaattttcttgaagctagtggctgtccttctcacgcttctctctctgcttctattgtctaattcaactctaggcacaaagcatttccagtaaataccggtgcaaataaagaataacttcttctatcatccacctacctagcaagaacatgagaataccctcccaaaaacaatcgttggtgcacagagctaaaagtcaaggctgctgttttgtgtaggtcagaaaagctaaaatcaagtgtatgccatggaggagttttaaacacagaggaaggcagccaacactgaagagcctttccctcattagcatatccaaaagggaaggaagtctggaataaagatgaggcaaggacagggaaaatcagaacctaagaaggatgcattagctgcagtggcatgacaggacagaggagagccaggacccacatccacataattattattctaattctcttacaattaccacagcttattcattgctagcactaaccctggtcttatatgccagaaggtgtcagtcacctgtcagtggcactattcaatgttttctgtggaaatgcatgtttctgacactgagtaaccccacaaacaattttcccttaggtgactgactggaaaaattgaccaaaatgggctcagctctatggtatgtaaattatatctcaacaaggctgttagaaaagaaaaactgtgtttttcatcaaagcttgtttcagtagaaataaactaaacaattttatttagttagctagaatttcactaactcaaaatcatcattaaatatacagtcaagtagggctttgtcttaaaaattacaaaggaacaaatacatccattttagcaaaaaatcttcatgtgtcttttagatgatccagtgataactgtaatagaaaactcattataacacagtcataatgagaaagaaagcaaacccttgccaaaatgaaaatccatggacagacagtgataacagctgacaactaactgtgccctgtccctgtcttatcccaaactctccttggttgctttgatttggtacctggcaaaggcacctaacacaacaaatgtataattggcacctcgctttataccatccttttctaaagcttccaacagtaaccacagctgtctgtttttcacagaattaataggaaagctactgctcatagcaaatatattcttcactgcagtctattacagtgagtcctcacttaacatggtttataggttcttggaaactgactttaagctaaacggcataaagaaaccatttttactgtaggctaattgatacaaacaagttaagttcctacagcacatttctggtcaaagaaaaaatcaccacgcttctaaataaagaccaaaagacttctaatattaaacactgaaataaatgtaagccagatatccatttaagtaagataaataaaaacaagttaagagaactatttacccagcttttggtgaactggtgagtgacggtggtcatagcggtagtgtgttaagtcaagcaataaatgtttgcaaagcaaaaattgttaaggggcacctcctaccatcatgcagttcaaaaactagcaagaacaactttggcaggatctctgaatacttttgtactgcatagtttcctgctatgcatttgtatgattgtatactttacaagtttttattttataatgatttgtattcacttattcactcattttccaacccacttattccagctcaggatcatgggtgactggagcctatcttgacagctcagggtgcaaggcagaaaccaaccctgaatagaatgccattccatcacagggtgcacacacatacacactcactcagggaccactgagacatgccaattcatcccatgtgcgcgtttttgggctgtgagagcaaacccgagtacccagagaaaacccacgaagacctggatttaacatgcaaattccacgcagacagtggtcctggctagaaatcaatttttttcacataaacgttatgatgaaatgatgttgaacaaaacgttatctgaggaactgccacagaggcagagcacaccttttatcatttaggcaaactgtgtgaaatcgtgattcacgaaaggcaaacatggggatctgacacatatcaaaggcaggaaattccaaaagacaaaggaacctaacacattcctttgtgcttccaattcacacctcactacctctgggttttcattccatctgttctaccataaatactttgagaattccatttttaagagtgtgaacagggtttctgacttggtctatgtaagtttaccacgcctgaggtttggcatccttagtttgaagcaggcctgtggggtgagctcaggttagtaggatgcaggctagggcttcagtcctctaaattcagctgtctcctaggcccaacctcaccctcagacagccagagataagttctggcttatattaggaaacacctttagcatctcaggggacagctaaaattcccttgggtcctctttggacatttcacagccttaagtatcccttccttattaggtacgacctaggcctaggatagacttagctgagtggtctctcaagttgagcaaggggcaaagcagtttccccaccggcaaccctactcaatgaatcaaggcaccaaccctcaggtgtagcacaaggaactgagtccagatggatgtaatctctttactgtcaactgcacgttatttgaataaagaataaaaaggtaccatatgcatcattacaagttataatgcacatacatgttgttaagcggtgttatatacaagcctcttaaaatttgcttggaaacaaattaaaaggatgtcatcaagtttgaaaattctgttttattaaaataacacccccccaaattttttttggaaggaattatgaaatgcaggttttctttagaatacctctaagctagagatttttccatactgtggggctcagcttttaaatccccctccctctttactgtggccaaacttctttacatcaaaatccatcaggcccttctccacgcagcttagccatgatgtggaatataggaggagttgggttcaaggctttgccccgctccaccactgagtgttacagatggcatcctagtcattcccacaccaagcgctgtagccacaagtgccaagaaaggtcgcctcaatgggagcttctcaacacgctcccaaaagccaagtatcctggatgtgggacaagcagcttaggactccagcaaggggaaggcagaccaggtttctccagtggggaaagtaaaaacctctcccctacttgaggactgtaatcagtcaccctggaaaccaaaaaagtacttacaggcattttgagagtttaaaactgttaaagggtagcagagcttttccactgtcaggactaagaattatccaaccaacatacagacaaggagaggacaatggcaagaggaaatgggccactttactgagaccagcgtgatgctcaatgtttataatgctgctttcctcctgtggaagatgaaaagaaagtacaaaaagagggggtagacttttaagtacacactatcaactcaagccacccagctgtttaagctcttcctgttatgcaaccaccaaaggcaatttctaactctagatgagttcacagttctaaaactgttctttgagtctgaccgatttaacacatcccacagatttaaaaggggccagagtggcctaaaatcttatagcctttacttaagctttttttggggacaatgcgctccataatttcagagacactatgtacaatggtaatccctacagttctcgatcaccttttcagtttcctcttgaacaaacttcaaagaagaaatatccaagaaggaagaaggcttatttgagcaaatcaggtgtacgcactgtagaagtttaagtttgattaaatgacacaacatctaatagtcgacagactgagctattaataataaactattaaaaggttgaatctgattttgctaaattatttcttgccattaccccactacacttcctcattggagagtgaatatttactgtaggaatagacctgttcaaataggtcagttgctgtcaaaccagtaacacgtcccctgagccaacccttctatatctatctccttctcaaggaagcagaaataaagtcaaaaacacctcaagccttataaaaggaaacaagttgaacatcctatttccagacctccctgccgatcactcggacagcccgttctgaggggggatgggagattctcaccatgcacgtaacacaaaacacaatcaaaatctcaataaccaaaacaaaggcaaaaaatgcaactgaccattaattaaacaaaaaaatgcagattacatctttctgccatttaagtataaaagagtagaaaaatgtaaagatgctaggcaaattcaactccataccaactctgaacctccccacgtcccccaccaaaagccacaatacagactttatgaacaagggtatccagagggtaaaaggacagaatacggggaaatgggaaaggtgtaatcactgtcattcggattgaaaaacaactgagctagaaagtcataacacaatcaaacctagcaagataggattcaaacagcaaaggcgctcaccagatgaagtgttcgatacatagagtcaccggacttgtcattgttttcaatcctgggcttgcgctttattttccacagtgcagacatcatcaggaatgtattctcatggtaattaattctaccacctgacgtgttcagcacggagacagaagtttcttaaaatattcccagagcaccaaacgcctcctagctctgaagagagcatcctctcatatggacgtcccatgctggttttcccatgaaaatctacggccacgtctcaacgcagcaaggacagcgacggtgagaccccggagctgcactcgcttcccaccagtgccctctgggaagctgtcaaaggctaaactgtggaccagaactcaggctttgatttcacctggctaaacaacaaaagttccagaaagggagagctgaaactggcaagaaaacaaagcacaaaatgcctccccgggatgtaagcgtctctgccctgcagcctgagatcagctgattggccagcatcctgcactgctcaggaatattaaacctgcccggctccgacaactttcaaggtattccacactgagtcaagagcaggcaactaagaaaagttgtgtgtgtgtgtgtgtgtgtgtgtgtgtgtgtgtgtgtgtgtttaacagttgataatttcacatttttccactcatgctttgttataaaagcagacatttctgagacaaaaacaatatggatgagaaagaaaaagtcattcctaatggaaatgtcctgaaaattattctaatacatttgctaaatggaaaacacaatcacagctgccaggcggcctggaatgcatgacacatgaccgcactgccctgaagctaattagcattcatctccagaaacaagagttttcaatgagaagcagagaaaaaagtagccagtgatgatgaggctttttgaggttgtcacccacagtcacaggagagaggaggcggctcagaaagagaaaggctgctagactgtccctgcagtgtgacattcccctgcccctccccagcggctgtgacattccagtaccaccacgctcaacaacaagcatacaattatttacttgctcaactctaaaaggccacacatagcaaaaactgctattcagtacaagtgcaaaacatacagaactccaacatgctttttctttatgctgaccgatatcatgtaaaacagtccatttagaaagaaaccaagaatattacacaaaatcaacagctctaacatattcagctggaataaaaagtgattatttgtttctgtttatttagttatttacacatttacatctctacactcagcctcgtgcattcagacaaggctaaatcatgcttccgagtttagacagctaacgattgaaaaattaattttcagcttattctcaagaaaagcttcacacttatataggagacgcatcaaaaaatatttagccttgatcaagaaacttcaggtgttttcttgctcttactttaaatcataaaaagagacacacagaaacattaagcattaggaaaaaatttaagtggtttatggctgtatatataaatggcctacagcaccactaataaattaattccttctttttatgaaacccagtatttaaaaccagatgttaacaatctggacacaaggtagttttaacatagccactaacaagacaagacctggagccaaaccaggtttgcatcctggttttgtcatcacagagctgtgtgaccttcagcaagtcgcttaacctctctgttccagtgccctcatctataaaatagggcagataatagtatctccctcaagagtgttgtgaggctaagatgagttaatatggaacagtgcctaatatatacaagaccttaaataagtattacttctcatttactattaataacacacagtagaacccagccaccaagaactgctcatttaagctttttgcgttcaaataccctaagtgagaaatttaattgaccaaaggttattttagctaactaatttgagttgcatgacaaaatttcaaatagagaagatgaagtctgaatcaaagcaaaaccaggaagtatttcggacacagaattacacagtgctccccacatccaacccagcagaatgaaatacgaacttatggtttgaatgcagtctactgcatgatctttaaaatatattcaaatcatcacccaaacttcttaatctttttttttttttttttgagatggagtcccacactgtctcccaggctggagtgcagtggcgcgatcttgactcactgcaacctctgtctcccaggttcaagcaattctcctgcctcagcctcccgagtagcttgtcaataattttgagaaaattctgtccctttttagaaagcccactaagaatttctacaagaaaatctttgaacagcaccatctatttctatatttgacccttcatgttccagataagttcaagagccttgttctctggaaaaagaaccacggagtcagagcgacacatgggaccagtcagcaaagccctggagcctcttccgtcctctccactgccagaacctcatattatacaggactctgtttatgacctcatgactcactatatttaacatggaaacgatctctctcaaaatccacaaggagatgagaacactgacctatcaaagtaaagtaaaaatgacctaatcattttggatccaatactttttaagtgttcagaaataaatgttttagatacaggaaaaatagctatttgcctaaatccagttagaaattgaaaattaatatttttagttcttataatactgtaacttaatagatacccttcaaattgtcttacatcagtatagaaatatctgtttctcctgaggacaactgaccgaccccacaaaagtaagtgggtaaaagaaatgtaagggtcacctaaataaaaaggaactttaagcagttggttttttaaatttgccttaaaaggaaacatgtgcatttccaatgatctgctttttaattaacaaccaacaacataatgcctttcagtctataaatattaatgttgctttcaaatattaaattttatattgtgcccaacttaaaaagacactgagaatgaagatcctacagtcaggaaagagaaacaaatatggataaaagatactgaagaatcaaatatgtgcacacaagaaagtcctacagaatatacacatacagggggaatcaaaacaggaaatgtacaaacgtaggttttcaaaataatagttcatgtttgaaaagcatttttccattatcaatgtgctttctcatagttatattatttgacccacccaaaaatccaatctccaagcaaaggtaagaatcaccctgattttgcagatgagaaaacaaaagtatacagttatgtgatttgcttaggttaagtgactagtaagcgtcaagcaaaaaaaagagagatcgtagagaaatatacatatctcaacaacattatagaaaaagatgaataagtatggaaacaaaatcacacgcaattgctttttttgcgggggcagtgtcgtttggattcaggtaacacagaggttttaagttgggttgtgttttgaagactgtggtaaaagaggctactgacccatggaactctttatgaagtggaatagaagcatgataagttatgggcaacaggccgggtgcagtggctcacgcctgtaatcccagcactttgggaggccaaggcgggtggatcacgaggtcaggagatcgagaccatcctggctaacacggtgaaaccctgtctctactaaaaatacaaaaaattagcagggcgtggtggcgggtgcctgtagtcctagctactcgggaggctgaggcagaagaatggcgtgaacccgggaggcggagcttgcagtgagccgagatcacgccactgccctctagcctgggcgacagagcgagactccatctcaaaaaaaaaaaaaaaaaattatgggcaacaatttcagtgtcttgcaccaaaaagtcaggagaactttcttactatgttcaactaagggaaagtgtatttggattaattttaaaatatggtttctttccctttaacataaaagttgctcacttttaacaagagctgaatgcaggtaattcaaaaggagttcattacagaaaccctaagtagcaagaaagcatagctgactcaatcccacatacttttgatgctgtttcatcctacacaaatgaagatgtaatagggaaatggaataaaattatggcattaactgggagctccagcagtggcagaaatttaagaaaagggattttatttcattacgagtgatttctcccctatattctcacatacaggtttgttaccaaggctataatttggatttcatttcctgctattcagcaacatctcagaagcaaaaacacttcgtccatggagaggcctggtaaccacatacagctgtgtaggtgacattgtcagctgtgattcttcagtggttcaaagcatgggatgtgaaaatgaaaatctctcaccttgctgctgtgatcagtctcatctgaggattccaagtctggcccctcggtctcctctggagcggtctcagcactgctgccctgctcgctgcaaaggctgtgccctgtcagatgaaatcagaagaaaatgtgggtcaacatggacagtaattgctaaaagccacccctgtgtgagggggacaaggaatctcgctcatgacatgtacatatactgtaagaccctccaagtacaagctccatcacctgggctcaatcaaattaaaatgatagttgttactgttactactagtattattactttatatttttcataataaataatagttgttgtggattgaatgtctttgtctccccccatacaaattcttatgttgaagacctacccctcaatgtaatagtagttagaagagggatgtttgggaagtaattaagtttagatgaggtcatgagggtggggtccccatggatgagattagtgtcataagaagagatagaaaccagagttcgttttctctctaccatgtaaggacacagtaaaaaggcagccgtctgtaagccaggaaaagagccctcaccaggaaactgaattggttagtacccagatgatggggcttcccaggctctaaaaccatgagaaataaatgagtgttgtttaagccactcagtttatggtattttgttacaacagcctaagttaagacaataataatttataataaaagaatatatatattatatactaaaaaattaactgattttgttgattttacaattagcaaattgatgaattaattcattaattactaaaataattaaataagccatactgagaacagtacaacaaaaaaaatgactgtcccatatccattacctgaaaaatcctgcaacgtctgtttttgccatgtctggcaaactataaacatcttataatacctgctcttcccatgatattctgtgcaaaagtgcaagcaactttcttcctttgctatttactgagtgcccaccacagtggttctctatagtggtcctctgcgttgagaagagaatatgaggatcactttcccctggggtgcttctcaaactgacagagcatctggatccccaggggaacatgtttaatgcagattctcattcaacaggcatggggttgggcctaagactgtgtgttccttactagctccgaatgatactaatcaaaactgcaggtccatggaccacacttggaatagaaagactctagaacattaaaaaccttctctaattgaatctgagaagacagtggattgagtaccactgtcctaaaatatgaggcactggatcacggactagagcactatcaatataaccagacaagagagaaggaaagagaagaaatgggagcagaaggagcccctgatgctttagatgaaagattccgtctgcaaagtggctaccttgctccaatgacaccattacagctgtaagctgcctggcaacactttctattcaggtccaagctggccaggaaagttagggaggaagtggacccctgagcaaacttggcaccaatgctgcctcctaccatccctttcttctctggaatgaagcaccaactaagtgagtgtaccctgaatggcttagaggtttctgtgtgtttccccaccttttggctctggctcttggattttcttgtgttacttttcagtattcaatcactcattacttgctcttaaggtggtagtggtcaaagaaggaagctcagttaacttggcagatatcatctatggcaactgccattgccaaagcaaaagtgcttgaatattttgcacaggggcaatgacctaggtacaggtactgatccctgatgtggaacagctgacaagctcatctgggaacacaatggcaacagcactcagtgctctgatcacaggaaccacagcatcctcagtgggacgtccggagcagccaggaggcacgactgacaggggcccccttcacactgtggtctgcagaatcacaacctcctggagttgaacaacccatatacactgtgcagagaaatgctgtaaccctgcacatcccatcgctcacaatgcctaggatagctgatgctcataaaatagtgggaaagcaaataaaaggatttccttttttttttttttttttttgagatggagtttcactcttgtcactcaggctggagtgcagtggtgcaatctcagctcacttcaacctctgagtcctgggttcaagtgattctcctgcctcagcctccccagtagctgggattacaggtgtgcaccaccatgtccggctaacttttgtatttttagtagagacagggtttcaccatgttggtgaggctggttttgaactcctgaatgcgcccacctcggcctcccaaagtgctgggattacaggcatgagccacagtgcccggctggattttcatttttaataataccgttgagagccaggtttcctgaagagcaaacaaataaatctacaaaacacttagaaatgctaaataaagtaaaacaaatgtcctttttaaacaaagctgagctccgaaaactctccaaagcccaaatgaagaagataaagttgataaaggaagtggggtagtgtccatgctatggcagcctaagtatatccatcaatccccaagccctaaaacggcgtttcccacagggtgtgagaacctgttggtgttagcagggggacaattcttttgggacagaattgtgcacttcgtaggtacacttggcactaggctccctggctcctgagcaccaaacgattaggacttgattgccactgtgacaatcaaaaatgtacccacacatttcccaacagcagcaccacccagtttgagacccactccctggagccttcggttttaactgtaagcccatgatacatgatacagaaaacagggcttgggtcagtacaacttcaggagttagaagtgaatgtcccacattcatatggttcccctgaggggctacacccctcagtctaaaaagacatagactaaaagagaaaagtgctcactggcaaaagaaaaagagatggaaaaagaaattctgcctatactttggggtaggagggtggaaaaggaatacagcaggtttcttccctgagattcttattatttttttttttttttggagacgtagtttcactctgtcgaccaggctggagtgcagtggtgtgatctcagttcactgcaacctccgccccatgggttcaagtgattctcctgcctcagcctcctgagtagctgggattacaggtgcccgtcaccacgctggctaatttctgtatttttagtagaaatggggttttgccatgtttgccaggctggtcttgaactcttgacctcaggtgatctgcccacctcggccccccaaagtgctgggattagaggcatgagccaccaggcccagcctgttccctgagattctttttcttttttgagatggagtctcgctctgtggcccaggctggagtgcagtggcgcaatctcggctcactgccagctctacctcccgggttcacaccattctcctgcctcagtctcctgagtagctggtactacaggcgcctgccaccacgccctgctaattttttgtatttttagtagagacagggtttcaccatgttagccaggatggtctcgatctcctaacctcgtgatccacctgtcttggcctccccaagtgctaggattacaggtgtaagccactgtgccaggccccctgacattctaatcataggactgacttcatatgtttgtattccaaggcatctggtaggagcaaaaacaaatctactctggtagaattcactcttaatgatgatatcatataatacccagagatagagcttggtcaaagaagaacccataatcccatattataaaacacaagaggcaacacatcactatgagcaagaggcaacagacacaataactgacaaaatcaggccaccaaggaatgacaccgcaatgatcagatgtagaatgtcaaataagtatgcttaaaatatttttttaaaagaagaaagggggctgaacacggtggctcatgcctgtaatcccagcacttttgggaggctgaggcgggtggatcatctgaggtcaggagttcaagaccagtgtggccaacacggtgaaatgccatctctactaaaaatacaaaaattagctgggggtggtggcacatgcctgtaatcccagctacttgggaggctgaggcaggagaatcacttgaacctggaaggcagaggttgcagtgagccaagatcgcaccactgcacttcagcctggcagactgagtgagactccgtctcaaataataataataataataatactaaaacagaagaagaaagagataatttcaaaaaacaccaggtaaattaatagaatttttagaaatagaaactataaccaatgaaatgaacactcaatagatgagatgtaaattgacgaaatgagagaagactggaacatctatccgaagacactgacttactagagctcctaaagaaaccttcaaatgttaaaactatcaatatggaattgcattttcagctaaaatatcatccacgaaggagactttaagacttttgagaaacaaagaatgagaaagtttatcatgaacagaatctcactgaaaaagttcgctaaaggatgtactttcaggtggggaaagaaagaaaaagatctggtatacaagcgaaaatgataaacagctgatacacacacaggtaagtcttagtatatatgacaaccccctcaactccccaaaaaaggtacttgggggcaaaaaaaaaaatacaaactgtaactaaaacaatggtggaagtgattatatttaaagccatttcataattttatgcaagagggaactagaaacattaactttggtttctgttaataatcatcttaaaattttaagatcaaacactaaaagaacagaaatagattatacaggttgaaaggagaaagcagaatttataaatgcaacctagaagaggacaggaaaggaaaagaaaaacaagcaagacaaattcagcaaaacaagataatagaaacaaataaaaatacacagatattctaaacaaatgtaaaacaggctaaacgtaatacttaaacttcatgtttagattatagaaaaaaacagtgcaaaacaaagccccagctgcatgctatatggaagtaatagacttaaacacaaaagacacacaagattaaaaggctggaaaactatattaggcaaacataaagaaagcctcaaaaatgtcagacacaatcgattagtcaggatacagaagatgtaaaaatcagtaattatacagcttgatccatgaatgcatttcaaacctattcccaagaaattggtgaatatacattttccataagaattagcaatttatgcaagtaggccacatattaggccacagtgtaaatttcaagcaataccaaagaatctgtatggatgcagaccacactggcaacatttttcttggaactaaatattttatgaaagaaaaaaaggccaataacacccaggacagtttttaaaaagaaaaacaagattagggtactttacctaccagatctcaaaacatattataaaattacagtaatctaaagcagtgcacaacaggctaacagaacagagagctcagaaacagagcctccatcccatgcagatgttcctcaacctatgatggggttatgtcccaataaacccatcataaagtcaaaaaatcattaagtcaaatcatcataaattggggaccatctggccaggtatagtggctcacacctgtaatcccagcactttgggaggcagaggcaggcggatcatgaggtcaggagttcgagaccagcctgaccaacatggtgaaaccccatctctactaaaaatacaaaaattagccgggcatggtggcacgcacctataatcccagctactcaggaggctgaggcaggagaaccgcttgaacccaagaggcagaggttgccaggagctgagattgtgccactgcactccagcctgggtgacagagtgagactccatctcaaaaaaaaaaaaaaaaaaaaaaaaaaattgggggccatctgtatatggaaatgtgaaatacagcagttatgccattgcggacaagtgagaaaggaatagaatatttgataaatgatgctaggacggtagattacccacgtgaagaaacataacattggaacctaactcacaccattcacaaaaatcagtaccagagatataaatcagtatatgaatagcccaaactgtaaatcttttagaagaaaatatagaagacagcgtttattacttcaggggagagagagatttcttaaacaagatgtaaagagtacaaaccatataagattgaaaattcagattttgctgaaattaaacacttttgtttgtaaaaaggcaccataaatacaagaagacatcacagactgataaaagttatcttcaatacatctaactaacaaaatgttaacatctaaaatataaaagaactcttacaaatcaataattggcggcatatctgattctaaagcatatatttttttatccccatatgtcatgttttctacccttaactgaaggtaaaaatcaataaaatgaattaaaatgggcaatgcagtttgtagcagatcatttgcaaagatgacagtgattatttctttcatctctttaagcgcagacttttatgtctatttcgccactccatgaatttgggctggtgttgtgatttgctttgataatatgttaattgtgatccaaggcctcaagtgactttgcagtctctggtcttgccctgctgggaactctgagcccaccatacaaagaaatctcaagctaacctcccatgagagaccccaaggagaggaggcccagctgtttagtcaccatacgtgggagtgagtaaggccatcttaaaccctccagccccagtcagaccactggatcacagagtcacatgagtgactccagggaaggttagcagaacaaccaaccagctgagtctggcccaaactgctgagccacagaacagtgagcaagtaaaacagttgtttcagagtggtctattacgtggtagtagataaccaataagtggtgagggggaatttcatgataccagaaagccagaaagcaggaggtgacagtggtacgcttcaaggaagctgaggagagacaccagcatggcaggaagagggaattcaagtgggaaagggcattgttctcactcccatacttgagggccttctctaaacactcccagcttaagaagtgtagacaacaacatggtcaagtttgtttgttttttttttaatcccatacaaacagagttttgcaatttcctactctagcttcccctgtgctactcacaatagtagtaggtgagcggctttcccctaatgacagaaattggaggaattatcctctttgttctggacattcctgtccccacctacttaccaggaaacaaagcacgacagctctgctaccaatcagagagagaagaaagctgaagataaggctcagtcgtggctggagaagcaggatgcccatccacatcccagtactgagcacactgccaggcatgcagcaggggaccgggggagaggaagagggctcggtctagagagacaaagtctcagggaatgaagaagcccagagcaggactgtggactctctcagacagggatcataggccaaatcaaaagctgctatagagcccggcgcagtggctcacaactgtaatcccaaactcttgagaggttagagcaggagatcacttgagtccaggagttcaaggctgcagtgaaccatgattgtgacactgcactctagcatgggtgacagagagaaaccccaactctatttgaaagtaagaaaaaaaaaaactgcggtaaccctgtaaatagaattgattgttgtgaacaggtaaaatcaatgctttgccttttaagttacctacaataatatttttgtgactgcaaaaacgtttgcaatcagtacctctgacgcaccatcaacaggacagacaacgaggagatttggggaagtacaaacatattagtgcagtttacattgagatttacctttcatttacccagattacacacatctactttggtttcattcaagtccatgtgggacttaagcttaaggaggaagaaaaaaaattctggcctcgtgagatgtcttaacaatgtgctctaagcagaccctccaattcaaacattgacaaagagaaacaattacaacacgaaacttttaaaaggtctttttaatgcctgagtttaaatccctgatggaaaaaaaacgtttgggggtgggggcaaaagaaagcttaaacactgtcaataaagatatttagctggaactcaactgttaggatataattttattttgcgtttcagtcattttactgttataagattttaagaattccatataaatacccataataacatcagcataaacactcacccctccaacaaagctaaaaaacaaagcaagaaagaaagagagagcgagagaaagagagagagagagagagagaaaagaaaagaaagaaagaaaggaatgttacaatttgaacttggtagacaaataataactcctttttaatcaaatgtcacaaaatctcagtttttgtttcctataaagagaaatttaaaattccattaaaactgtagatttaaaatagtaacttctttttagtcaaatgtcacaaaatctcagtctttgtttcctatagaaatttaaaaatccataaaaacttactaatcctgttagcttgttgtgaaagtcaaatatacattaacaatctttaaaaatatcaaaatagagcatctcagtctccgaaacatgttttttcacacgcaggatttgacggtgtcatcagtcaaatctcactggaagttaccccgcccccggccatagcagggcccacgcaggcaggccatgtgctgtgtgacaagaagcacagcaggccgacagtttacgaggcgcgcgtgtctccaaatgttatcgacaaacaaacagaggaccatgtgctgccgggtatctgtgagacttcagagaatctgaagccctggaccatatttgtttgtgggaagagaaatctgtgcagttcctcttcctttgccgcccctccctgccgcctgactgtcttcggttttcagaatcgagctccaggccatctccatggaacatcagaccaaaatagaacctcacacttcacgggtactgcacagaggcacgtcctgcccatgcagaccaagcggctgtccgtgctcagcacttggcaattcctctctctgaagcaaggtgccttcgactttcacggctatcacagaggcctttcctgttcaacaaacgctgcttaatctacttcctgcaggagggacactggtctggactgcagagcacaagcttccacttggcatcagacagacacgcctgaggtttatcaaaggatctgactctgcaactccagcgctggccctaattgcctttaacatgccataggcctgctgttagccacacgcacttggctttctccaacaccacagcaggaataaccattttttgaacaagaagcagctcttggaacgctggaacttttattatttttaaaattgttaccttttttctctttttctttttttgagagagagtttcgctcttgttgtccaggctagagcgcagtggtgcgatcccggctcactgcaacctccacctcccgggttcaagcaattctcctgcctcagcctcctgagtagctgggattacaggcacctgccaccactcccagctaattttgtgtacttttagtagagacagggtttcactgtgttggccaggctggtcttgaactcctgacttctggtgatccaccctcagcctcccaacgtgctgggattacaggcgtgagccatcgtgcccagcctgttactttcttttttagagatagggtcttgcttgtctcacaggctgtgtgtagtggtatgatcaaggatctctgcagcctcaaccttctgtgctcaagtgatcctcctgcttcagctgcctgagtagctgggactaccggtgcacaccaccacgcctggctaatttttaaatttttagtagagacaaggtctcactatgttgcccaagctggtctcaaactcctgagctcaagtaatcctcccgcctcagcctcccaaagtggtgggattacacgtgtgagccacaacgaacgcttggcctctggcacttttattgtaatcctgtgggctactcactgaggtaaaccaaggcacctgcttcgccccaactggtcaagtggaattctagggacaatcacagcacagctgtataaaccacaaaaataaagtgaacgtgaacccaaagagagagagaaacaggcgtttgaaacttcggaaagacactaatggtgtcacttcaactatgattcttataatttgcataaaagctgaggttttgcataattactgttacataattccatttattttttcttggctttcttcttgatgtaaaaaggaaaaacaaggccataaatggggatttgtgttggaattctctcaataaatgctttataaaacttttttttttgagacggagtctccctctgtcgcccaggctggaatgcaatggtacgatcttggctcacagcaacctctgcctcccaggttcaagagagtctcctgcctcagcctcccaagcagctgggattacaggcgcccgccaccacgcccagctaatttttgtatgtttagtagagacggggttccaccatgtcggtcaggctggtctggaactcctgaccttaggtgatccacctgcctcggcctcccaaagtgctgggatgacaggtgtgagccactgcgcccggcctataaaacttttttttaagaactgttttacatctagatttgctttgctttcctatattgatgttccctgcaacatttccctaaaagggtgatagagctataccttttaataaattaggccagtagttctcaactgggtaagatttggctgcccagtggccttttggcaatgtctgaagatatgtttgatgggcacaacttggggaggtggcgtactattgtctcgtagtggcttgcaggggtactgctaaacatcaacacacaggacagctccccacagcaaagcattacctagcccagattgttaatattgctagataagatcagtattcaaaataaatcacacaagaacacaagagagacttttttgaaacctcatacaaatacagttctgcaacttcctattctagcttccccttcactgctaagatctttttataaaaacagccactgaaggaactatctttttgtcctagacatccttccctttttttcctaccaatatgtatgaaaacaaatgcttaaaaaaaaaaccaaaacagatgaaagtagctccagtaagactgcaaccagaactcagggatggcaaacagccaaggataggaaactgagtcttacagagaacactcagcatagactctccttatgcagatcctggctttctaagccaacgtggcaacccattcagcaggcttccctcgtaaaccaaggaacgggagaatggagaatgtactacaggaccacctaacaaattttcattacaaaaaaatctcaatgaagcagatcacaaaatgtgatcaagaaactatagaaggtttgcatgtcaccgtaaaattccaattatcttatgattccaccaagacaagaaaaaggacagggagcagtaaccaggaagagttggtgacctaaggcagtggctcccaaccagggctggacattagaagcaaccaccggaacaaatgcagacccagaccccatcccacactaggtgactcatgagctctgaaaaagggcccaggaacctcagcattctagactacagcattcagttctttctactcgagaaaggaaaatatgaacaagctgtaattcacaaacttagttatcaggtaattcacctgttgcagactgaggtggcgtagaaggcagggagaatactgaaaaagagcaatctctggtcataggccagggaatcctcatgtcccccataagagaatggcttcaggtacaaaacatttattgagcgcttactgggtaatattctaaatgctttacttttatgcctcatttggtcctcacaacagcccaatgagatgacagtgtggcattatccccattttgcaggtgaggacactgaggcacagagggattaagcatgaccaggtcaaggtcatgaagctgatgaacatagaaatggactgatttctggccaggcatggtggctcatgcctataatccctgcactttcggagggtgaggcaggtggatcacctgaggccaggagttcgagaccagcctggccaacatggtgaaaccctgtctctactaaaaatacaaaatttagccgggcgtggtggcggatgcctgtaatcccggctatttgggaggctgaggcaggagaatcacttgaacctgggaggcagaggttgcagtgagccaagatcctgccactgcactccaggctgggtgacagagtgagactctgtcccccccaccaatgactgagttccaaagaaatggactaagttccaaataacttggttccaggccctaatcttcgccactaggctgtgatgcttctacatagaagaaacaaacctctctatgagaaagcagttcagaaataatccaactttgaaagctaatcccatactcactcagggtccttaagggaggacctggccaagtctgaccacttgagtttgtgagactgtggagctctgcaggacaagcctccagcagccaggtagcagccagcactcacgtggaccccaaggtccctgagacccagcaaggctctctgtcgaggacaccaatcatccaccttaacttactcccatcaaacctcaaacctgccactcaggatgtttcctatttttgttacttctaaatttagactaaggctgtagtccatcctgcccgttgtacaaaattttctcggttgttttctattttaactgcagtggtctgctgatactgctttatctctgccccatcacagagcaatctttcagttattttatcctgtttatttgcctccacttttatcttccactgttaagtggggactaggaagcagaagcaatcagaaggcagataggcagagacccaggtggggaagtgaaatgccttctctccaccagcaggtccaattgggctgctacttgaccaagtattcaggaattctttttttttttttttttttttttgagacggagtctcgctatcgcccaggctggagtgcagtggtgtgatctcggctcactgcaggctctgcccccggggttcacgccattctcctgcctcagtctgccgagtagctgggactacaggcacccgccaccttgcccagctaattttttgtatttttagtagagacggggtttcactgtgttagccaggatggtctcgatctcctgacctcgtgatctgcctgcctcggcctcccgaagtgctgggattacaggcgcgagccactgagcccggccaggaattcttctgaaatttactaattttgaagccagtttagaaactttaccaaaaacaaaaacaacaaaacaatacagtggctttacttccatgctttattcctgagtcagtctgattacctaacttgacaaagcagactctgttctggaggatttttcttttttgatggagtttcgctcttgttgcccagactggagtgcaatggcacaatcttggctcaccgcaacctctgcctcctgggttcaagcgattctgccgcctcagcctccctagtagctgggattacaggcatgtgccaccatgcctggctaattttgtatttttagtagagacggggtttctccatgttggtcaggctggtctcgaactcccgacctcaggtgatccgcccaccctggcctcccaaagtgctgggattacaggcgtgagccaccacacccagcctgaaggatttttgatgattgtaaaactacaaaattttaagaaataaagcaatgtggccgcacacagtggctcattcctgtaatcccagctctttgggaggccgaggcgggcagatcacccgatttcgggagttcgagaccagcctaaccaacatggtgaaaccccatctctactaaaaacacaaaaattagccaggcgaggtggcaggtgcctataatcccagctactcaagaggctgaggcaggagaatcgcttggacccaggaggcggaggttgcagtgagccaagatggcgccattgcactccagcctgggcaacaagaccgcaacttcgtttcaaaaaaaaaagataaagcaatgaaaaaatgaaaaactacattaaaacataaactggaggacaaaatttgagtcatagttattatcaaactttcagctccatgcctggcacatagtaaatacttaaaaaatatcagctccgagttatggccgcttaattgaaaaaaaaaaaaaaccttccaaagatgatcccaaaattgcagttttaatgtgttttaaaataatggcagggtccatggatttagcgcacagcctccaaaggtgagcggtctgaaggaggtaacgtggtcagttgtaaagtccagttgtttagtttaaaactccaccacacaaaagaccagacagcaactgtatacacagaaatactcagatatttctaaaatagatatatataaaatgcattttaaaaatcttttaaatgcatttcaagatttattcaatgcattttaaactctattaaatgtattttaatagatttttaagcaaacacacgtacacgtacatatacatacacagatttttttttttttttttttttgagacggaatcttgctctgtcgcccaggctgaagtgcagtggtgcaatctcagctcactgcaacctctgcctcccgggttcaagcgattcttttgcctcagcctcccgagtagctgggattacaggcgcctgccaccacggatggctaatttttgtatttttaacagaggtggtgtttcaccatgttggccaggctggtctcaaattcctgacctcaggtgatccgcctgccttggcctcccaaagtgctgggattacaggtgtgagccactgcgcccggtagactttttttaaaaaagaagaaagaaatagacgaaaacattaaccgtgtctatccttaaaaaaacaaattgtgagcaatctcagtcatactttacatcagggacagcgaatttgatgtgtaaagggccatagagtaaacacttttggctttgtagaccctaagtccttgtcacaacgactcaactctgccattacagaaggaaaacagccagagacaaggtgtaaatgaatggcatgactgtgttccaataaaactttatttacaaaaacaggtggtgggctgcttttagcctatggattatagtttacccacctctttttttttttatatctgtaacccagaagaagggctcagacagaagaaaaaaatccaaagaaagttgagtacacactgttgcttatagcacatatgtgcaagcttataaaatcctttaaataatctaatctaacataatatgtctcattcaaagtcatattccagaaacaactctatctgtgaaccgttttatgggatcgatcctgccatcttgtggtcacatgaaataacagcctttatagtcttcattctcctttactaagggtacacaactcactggagccacttttcaaaaatttgattgggatgtggggaccacaataacataatgagtcaaggaagtcaactgtaactgagagcaatcaattttctgaagcttcaacttgtcaaaatcttccaaggagccaatggacaaaagaatgaggggtccaacttccttagcaagccaagcttcagaaaatgatttgaaaaacaacaatagcagggcaagaatatccaactacccaagagccttccatttcagattttgaacagaacgctccttttgtatcccaagctttgaaaagagaaaataatgacaaaaccccaacttactaaatcaacccaaacccgagaacccggtcatggagaaataaatgatagtaatctatgctgttcatctgttccatcactcactcactctcttgctgaacaagaaagggccacccatgtagcaaaccacatgtaaagagccgggaagacaaaaatgaggaatataaacccagtctcaggaaacacatttaggcgaaaagagagacacaagcaagtaagaatcgcatgatctaatgagggcccatatggaagtcaaatttgcagggttgtgggggcccagaggagagagctaactctatggggtcccaggaagacttcgaaaggcaggtggcactcacgctgcttctagtagaatgagcacaggttgccagaaggagcggggagaggaaggaagggcagggcaggggggtcactgaagcgctcgggttcagtcttcaggttgaaaaagtccaaaagacaaacagagctctgcacacatttccactctgggcctctcagcatctcagctcacgtccttctctcagacagcaggaaagcagggctgagtggtggtttggaagatgacgatagagaaggcaggaacagaggtaggacttagtctcagcatcttatgtgattcccagcacttcttcttcttcttcttctttttttttttttttttttttttttttttttttttttttttttttttttacgagacaggcctctgtctcccaggctggaatgcagcagtgcaatcacagcttactgcagcctcaaactcctgggcccaagcgatcctcctgactcagcctcccaagtagctggaactacagatgctctccactatgcccagctcatttttttttttttggagagatagagtctcgttatgttgcccaggctggtctcaaactcctgacctcaaggtatcctcctgcttccacctcccaagtgctgggattacaggtgcgagccaccacacgtggcccaattcccaacacttctgtgcctctgtatctctatccacagcaaagtcttctaaatattcacctttccccaaaatgagaaacagcagaagcattataaagctgcccatgggtgacaggtggatctgtagcaaaacagctctatgagaaaataaagttccctgcgcctttgaaatttcaacaggaaatgcagggccagtcatcagcccatcttgcacacacattttataccacctgccagacagaggcactcactgaaacacacaagccgcatgataaactccccgggtcgtggcacaacggagttcagactcgcccccagcaccctgcacagccatacctgggttgctggtgagaaaggcgagggggctctcgccaaggtcggcagggccgtccactcggtggggcgggctttccagcagctccactccttcctccagctcggggtaggtcctcaccaggaggcccagcgagggctgtgagaggaaatctttgagcatagaagagttcagggcgtcagcagcacgattattgatctcaagaatctcatctcctgctttcaggcctgccaacgcaagatggaaaatttttaatttcacacacattatcagaacacaacagcttaggagctctgctataaagggcacacctgctgtgggtctcacagccccaggtgctgctgcagacaggctgcggtgctcgggagtgatcctcaggagaggacaggggcctcaggttctgaaggttctagatttgcaggttacaacatgcctagctggtccttcatacatcaagcaaacaaacttactccttcattaatttgtgtgttccaagcatctgcaaatttctcacaaatgctaattaattccggttatcttcctacacttttggggcggggcgagcggggaatggcagtgctctctgatgactgccatcactgtgttttgtacatgttcatgcctcagtgcacacttaagtcacagccagctaatatctattgattatttccaaggaaccaaaatgcagggcgttcactctggctatgaggacagaagtaagaatgtctcattccaaatacacttagagatgacagtttcaagaacccaatgcaatcattttgtccttttttgttttgttttcaaactacatctgaaccttgggatgaatctcttttggtagatccccaaaggatctgctaggggaattgccaaaatttgggacccaagggaacgaccatgaacaagcccaacctagaagaacagcaagttgagacaccaaggtgcagttcaaactcgcactggaagaacattccagcagcctgagaaatggagagggtgggaagaacatgaaagaaaataaaataatcctttcagctagggagagaaaaggagcccaatttctaattttatacaccaatatggaaaaaccaacttgaaaaagggagtgagcgaagggcaggcaaagataaattgcaggaacgagaagcctcccaggccctcgggcatcccactcagattctgcagaaaatgaccctacaaagaagttctcgcttcccagcttcacagagtcacatgccctggacatccttattcaggtttctaaaatatctgaaatcattttttttttttttttgagacggagtctcactctgttgcccaggctgaagtgcagtggtgcgatcttggctcactgcaacctctgcctcccaggttcaagcgattctcctgcctcagcctcccaagtagctgggattacaggcactcaccaccacgcccagctattttttgtattttcagtagggacggggtttcaccatgttggccaggctggtctgctgacctcaggtgatccaaattttttaaaatttttatttatttattttttctgagacgaagtctcactctgttgcccaggctggagtgcagtggcacgatcttggctcactgcaacatctgtctcccgggttctcccattcttctgagtaggtgggactacagtcatgtgctaccatgtctggctaatttttgttttgttttgtttttgagacggggttttgctcttgttgtccaggcttgagttcaatggcgcgatctcagttcactgcaacctctgcctccccggttcgagtgattctcctgcctcagcctcccatgtagctaggattataggtgcgcaccaccatgcccagctaatttttgtatttttagtagagacagggtttcaccatgttagccaggctggtctggaactcctcacctcaggtgatccgcccaccttggcctcccaaagtgctgggattacaggtgtgagccaccgtgcccggccaattcacagctaaatttaacataaaatacccccaatatctttctagacacgccaggtgttgggatcgtgtttgtggaccaggaggacagaatggacatcactcttgcatctgttgagaacagagcaagggggttagtacagatgaccgttcatcttcatttaacaccagggctctcagattcaaagacctaaaacaggatgtgactgaaaccagagcagtagattccccacccccgtgccacgcaaaccggcacactcgttgtgatgaaagagataaaaatcagtctttgggcttgaaggggaagaaatcctgtcatctctgctcttagctgagatacagctcagtgactgggtcaaactctggccccaggctgcctatggcctagaaagtatagaaggaacaagaaggaaaatgctcctctgtgacagtcagcagcagataaattatcctgactttatttctcactcgtcacacctttgcctttccatgcatagccaagtccgcggttgtgcttttccagtgtttacaggacaggtcaatataacctgcacaggtagctttgcaagccatgaactacccagaactcagctgaaccaggacaaaaaaggcagtggcgaagatcagcactcaatttcccttctctgctccattcagcagtagttaacacaacagatgcaaggtaagtacatctaagcacagttgatctggatgtgttgatctctgacgttcaatacatattattttgccacttcttggatgaaactacaaatcccatagcaagaagaaagaaacaaaggtggatttccagccctacctacctgtcccatttatttacagcgagtatagtgggtcgaatagagtccctgtccacctagaatgtcagaatgcaaccttctttggaaatagggatagatatatatcacagatgaaattgtaataatataatcattgtaattatataataattgcacatcataattatatataattatgctatataattatatataattatgttatataattatatataattatattaacgattattatataatgtattaatatattctatatttatatattatatgcttatatatttatatataatatgctaatataatatattatgccattatatattatatattaatataatatattatatattaatataatatattatatatcatatagctatatattatattaatatattatatatcattatatgataattatattataataattacaatatcatcattataattatataataattacacataattatatactattacacacgaaagttacaatgaactcacaatgatttagtgtaggtcctaaatccaatgactggtgttcttataagaaagccatgttaatgacacagagacacacacagggcagaagccatgtgacttcaggcagagattggagtgatacagccataagccacagaatgccaagtgctgctttcacaccagaaaccagaaggaggcatgaagccattcttccctcagaggcttcagagaaatcaatcttgccaataccttaatttcagacttctggcctcctaaacggcgagaggataaatttctgttattttaagccacccagtgtgtaacagtttattacagtagctctaagaaattagcactgtgagcaaatcatctaggttgcaaagactttccaggggtagaaaaaggatgaagagttggggttccccaagtagcccaaatgcattataggccatttaagggctaaaatgaaacaggcaggatgtagcggggaagcgctctctaaagaaggggagggaggctggatctcaaatccctaggttctcaactttcgcagattcttctatgaacggaagcaacagaacaactggtttgaaagagctctgcaggctcaggcaatagccaatgtcagctttgaccagtgtggaccaaagtacagaggggtcttcccccatgctctgctccaggaagaacccccccaggatccccacaccatcctagaagatggagaaggacgaccacatgattagaatggaatttcccaccagccccagggtaatgggctcaatcagtttaaaatccaaaaatgagtgacttgagaggctgagacaggaggatcgcttgagcccaggagctcaagaacagccggggcaacacagcaagacccctgactctgaaaaataaataagtaaataaattagtcaggtgtggtggcatgcacctgtactcccctagcgacctggggggctgaggtgagagggtggcttgagcccaggatttcgatgctacagtgacctatgattgcgccactggactccagcctgggtgatagagcaagaccttgtctctaaaaattaaaaaaagaaaaaaaaagttcaagaatatgacctttctggtacacttaagttaatggaataaaatgcatattccctggaagggttttcaatgagaaaatgttcaaatactttccacaaatgaatcctttgggcatatctttctccttcaaaaactagagaagccccaaagggcatttaagacagacagaccagccctccttcactgacttacctttcttggaagctaaaccggtttccttcacactattcacgtacagccttcgaataccatcttcttccacagaagaaagtgaaaaccctgtgaaacacaaaaagacagaatggcagggctcacaccttctgaatgtttagcaaacaacaggaagtgcctgctgtgaactaggtatgtttcatgtttgtcattatagtttggactgattgttttttcttgttttacatagcagaaaagtgtatttttagatcactctggaagtcactacttgtaaaaataaagattactatgtacgtctatcttcatattacctaccaatcaactcaaaggaaagcaaattattttgtttaatcttgcttcctggtaaacgccatcattttttcttttccatactctcctccaaagcagaaaacagaaagattagcttacctcaaagtccccagacgtttttcatcaaatctatgtcctagaatatgttaacaactgtactgttggagggtgtgtgttcatccatatgtatgactatatggacactgctttaatacaattctgcaaacaggagcaagatgcaactcacattacgaatctgtaatgtgaattacacattacagaaactgtacctgatttcacactctagcagtatctgatcataagattatcttatacttctctgggctcccagagctcaaagccaacttgctaattaaccctgggctctgctacatacttcagagaggaaagcagagtgaggccgaggtattctacgtggcttgaggatcctaggtactcaaaactctatggttacaagtcctggtcactcctgtttccagaccgcctcatgtaaaactctttcctaatcaattactttgaatgtccacagtgaatacctactttgctaagggaaagaaatacctttgcagatatttctaaaaagggcaaggggaacacatgtcattgtatatatctgcaataatttcagctctgggaaaaaaatcatcccataatatagatacccatcgtaatgctgaggggagagcagtggttgaaaaaaaaacaagcaggcaaatagcaaaacagaattttgtaagattgggttccagggagtcattgagcctttttaggccatgtcatgatgaacacatggttttttgtttagtttacaggaccaggaaatggataacctcacataggcaaaaaggctaattgccatcgccctctcaagtaccgtaacaccctcagatagggaacagcagagggccacccgtgaggactttccaaagtcttcatttcattctcttattttaaattctcttctttcagcaacttctaactttcagattaagtgtcaagaagccctgctgaaatcaaaatatttttacacaagaaccatttaagttacattagccttaacacaggtgtatttatctgcattttagtggaaattaaaaaaaaatctattaggcgagatagaatcaagggctacgtcataggaaagaatgaataggattcatctaactattggaatttcctttttgaaatgccatcattctactacattctgagaccaatttttttgtttgtttgttattaaagagacagggtcttgctctgtcccccaggctggaatgcagtggtgtgatcatagctcattgtagcttcaaactcctggattcagacaattccctacctcatctaccagaagacctgggactacatgtgagtgctaccatgcttgactgattttttaattttttttagagatggggtcttactatgttgcccaggctggtctcaaactcctggcctcatgcgatcctcccacctcagcctctcacagtgttgggattacaggctttcactactgagcctggccccagttttttttctattaaaaaattagcacccctgtggggtaccaggaaacacctttgcttaactggaagatggcaggagaggcaacatggtgacagcctgctgcaagtcacctgaagccaattagatggagacatggagacacctcaggtatgatttgctccattccctcttttttttttttttttttttttttttttgagatggagtctcattctgttgtctaggctggagtggagtggtgcgatctcagctcactacaacctctgcctcccaggttaaagcgattctcctacctcagcctccctagtagctgggattacaggcacacaccaccacactcagctaatttttctaattttggtagagatggggttccgtcatgctggccagactggtctcaaactcctgacttcaagtgatccacctgcctcggcttcccaaagtgctgggattacaggtgtgagccatcacacccagccattccctcttttcttggtcctctttttgtataatcaaaaggttaaatagaggagacttccagtctgaggactgcaattgattatgtaatttgtaccagacaactgggtaaaaagactaggtctgagaaacagatcagacatctctaattagtggggaaatctctatgataggaaagaggatggaagaaacgataatgggcataagttccttctttgaagatcacccaaatgaaagccaaaaatttacaaaagtgaatagcacattagctctgtactggaattcatattggacaccagtttaggggtcaaacaggagcccctttcactgttccaggtaggcagccctccccacaccttgccttgcaacaaacatgtgagcggcttccatttaaagatgccaatactttgcacactgggggaaaaccttataaccatcttctacatgaacaaatataaagaaaattatgaaatatcctacagctggattatgtggaactgaatgaagaacataatgattttaacagttaatcagcaaagtcagatctatttcttttaaataggacagcaatgttctaactctcagcagacaactctaatatcgtccaaaatgattgccaacagggggcagagggaaattattcaatataaacctatgtatccaccaactggaaggctgttagcttcaaatacaggaagggatcatgagtggcaactggaataatgatcaggagaacgaaggaagtgcttaaaattaagtgatgaaactaaggtcgggcgtggtggctcatgcctataatcccagcactcttggaaggctgaggcgggaggaaagcatgagcccaggagtttgagaccagccctggcaacacagtgagaccctgtctctacaaaattttttttaaaaaattagctgggcatggtggcacgtgccttgtagtcccagctacttgggaggctgaggtgggaaggatggcttgagtctaggaggttgaggctgcagggagtcatgatcccaccactgcattccagcctgggcgacagagtaagaccctgtctcaaaaaagaaactaagaacaaactcatgagatgaaccaccaaaagattcctcaacctagaaaaaccataacatgataaacaatagagaattactcaaaactagagtccaggatacaatgaaaattcagataacaagcacaggcacctataacatgaggagaacacacgactaaaaaatataatagtactagaagtacccagagaaaaggaacattaagttgctgaaatgacgcatccttctacttcaaggcagccgagggtctcatgcttagtctaagtatcatgtaactggatatgtgaactaatttcaacagtaaagtgtgggagtgagctgagggctgagatggagagagaggcaagagagagaaattaagtaaatgttcccgctttaagtgtgttcagtcagttggattattaaattatattctcctccctaaagtgttctaaaatagaaagcagcatatgatctgtattgtgaggtgtttctgtgtttgtgccggcagcttttacttgtactgaactcagtatctaaccagaagccacttagctaggtgttaatattagatacagatgggctgaatttcgactctgcggtagcttttaatccagaggcaatcagatctctgaggactgggggaatgtttcacctcttcaatcaatacgctgctggaacatcaaatgccaaaaccaacccgagcacggagaagaaatgatttaactgagcttattagccatgagtggcaggcttttcttttcttttttttttctttgagacagagtctcactctgtcaccaggcgggagtgcagtggcacaatctcagctcactgcaacctctgcctcccaggttcaagtgattctcctgcctcccgagtacctgggactacaggtgtgtgtcaccaagcccgtctaatttttttatctttagtagagatggggtttcaccatgttggccaggatggtctcaatctcttgacctcatgatctgcccacctcggcctcccaaaatgctgggattacaggtgtgaccctctgtgtccagcctgtggcagggcttttcaaagtgaagtcagggaacaggtgccaactgtttgctaatggcagtaatgtcaggacagaaatcaagactaagcattgagaacctcttgtagctttgacattgccacaacctccaagcatgggattttgtatttcacaaaagcagcagtggtcacaaaagagtggaaattaaaacaaaacaaaatacctgcttctttacatcggatgagttgggaagcactgtttgtaacactctcaagactgacgcctggtgccctgtcataccctcctcagggggtaaaagtaaatgggttctgtgagtaattcagtgactttaacaaaaagtattaaaatgtatacaaacggtagcagtttcatgcccagttccaatttctgagtccctgaatcactcaatcttagaagcagagtccaagagctttgaaattcagccttctgaacttgatctttgctagtttatccttactcaacaaaaattaagtaaactgaagagaaaaagaataatcattatggagcatctaattttggaggatccaggcacttcactgctaccaattacagctctaattactgaggtcggctttttgctgcataataagccgctcataaacatttattccttgccatgagaaacattctcctggctttattatgtctttagttttaaggtcaagaaataaacagcataaagttataacgcaagtggccagggttcaaaactggattctcttcattaggcccaaatcctctattgagtattccgagatgaagactggtggcctacaggggaaggtgcagaaggaatgtaatatcccagtgctcagaaaagagttttaaagattttcaaatgctaaaaagcttaataacctgggccaggcacagtggctcatgcctgtaatcccagcactttgggaggccgaggtgggtggatcagttgaggtcaggagttcaagaccaccctggccaacacggtgaaacccgtctcttctaaaagtacaaaaattagccaggcatggtggcacacgcctgtaatcccagctacttgggaagcaggagaatcacttgaacctgggaggcagaggttggagtgagctgagatcgcgccactgcacttcagcctgggcgacagagggaaactgtgtcttaaaaaaaaaaaagacagcttaataacttgattcagagagaaatcttaagcgagcatatgaggtagtctttatgtctttccaccgggaactttgttctccttctaccaaacagtagaatcacacttcagtgctccctcgtaggtaggtatggctgtgtgacttgctttggccaatgaattgggagtgggacaacacctgctttcccatctccccttccccctctgcagagtgacaagcactgtcccaggtggcagctgctccagacctgggtgtggaatgaggacaacgtatggagtcccagccaacccacaagggacgcgtggtgaatgtgagaaataaatgtcactgtttcgagccaccgggctttggtggctgtctgttacctcagctaacctcgccactcctgactgatacagcacagcatggattttcctcacttaatttactcaggcaccaactctgttactattcaagccatacagtgtaatgctaagtaaagaagactggtcttaaacatatggaaaggaatatatatttaactccgccagaatgtagacaaccgcataggaaagcgttaacacagcaggcatgactgctattcttcgaaaggcccgcttacaaatttgaaccttggctggtatcctgagaacttggattttgggagggttcccaacaccctgagtggctcacagtgcctaaactgtggtacaaacaatgggatttatggtgaacgcctactttcctcctgggagtctggaattttggtgcatgctaggcagagggtgcctagggaaccagcctccccagaaaagccctgggcactgactctctaaccaccttccctaggagagagcatttctcaggtgtcctcacaacttggtgctgcaggagttatcctcattctacgtgactccactgaaacagggcccgctgaagctcacacctggtttcccctagacttcactccatgcgccttttccctttgctgattttgctttgtgttgatacaggagttaagatgaaatgatttaggcagagagcgaggagaagaaaatcctcagtaacattttccttttaatgaaaagcaacccccaaataatttttttttgtaacaaaaagcagcctgtaaaatcaagctgcacacacagacaagcaagctggaagcttacaccggtgagtgccggcagtgtgaatcgggaaaagctagctgggactaagcatgttcaaaatggcggctccatcctctcttctctttgtcagccatgcgtacagtaagaagcagtgaacatggcccccgccaggcaaagactccatttgcataataaagattaggatagggcagccagcttccatgcgtgctgtgtagacctcacacctggtccaaacaatctgtgggccttatgtaaatcagacaccgcctcctcaagcctggctatacaaatccagtgcattccgccgctggccggaagacccactcgggcacccctctctctctgcaggagagagagctattctcctttctctttttttttgcctgttaaacctctactcctaaacccacttcttgtgtgtccgcatcctcgattcccttggcatgagacaacgaaccgtgggtatttacccaagacaacgaagccgcttcagtataatttgctattaaaaaaatcatagttgtgagtatgaccagaggctgagctctgtgggtcttcctagtgaatcagcaaacctagggatggtcttggggacccccctacacaccaccaaaatagttcctttaacattatttgtatgggaagggaggataatgtaggataatggcttacttattttgagatttctcaaaatttatagttttcgggagggggtgtaaaagaataattcctacattactaaggtacatcatagtatatgttaaacaaaaattatgggaggtcattgttgtgaactgagttcctgcattatgcccgaaaggccagatcaaataaaaatggaatcactcatgctggatgccacataatcaaactaaaactttcaggaagcaagtagatccccaaacagaccagtttttcctgaaaacatgagattccggtctacctgagtcaacaaaataagtaggtcccctctgctttaacccttacaaaaaagtaacctgaagtaagctaagttaaacaatcagttttcttcttccactgttctgtttccttgtcgccaacttacaaacatcactgttctgccactgcccagagggagctctcattctattttgtagaatggaggctatcccatgcatgaatcacaaataaaagccagtcagatttataactaaacttgttgtaattttatcttttgacatataaaataagctacccacttcctttttaggacagtagaatcccagtaattaaagttatgaaatttaacaccaaagtctacatcgtacccagagtaaatatccctgttattccctagtgtggctgccctccacagagcaggagccagatatactatctgttttagataggactcaaaggcattttgttgaactgtaaataaatgcatgcttacataagaaatactttaccttaaaacacaaacaaagaaaaataaacttaccgtaagtatcagcagctgtatctgacttctcaatgtggatgctctgagtgacttttggacagatttcaatttctttgtacagctgaaagttacaaaggggaatctaattagaatttcattataactaacttttaaaaatggtcatcatttcataaatctattttttcacaattgatacttacgtgaatttgcacttcacaatcttatcattaaacgaaactcattaaaagtaaaaagtaaaagtaaaaacttccagctgtcgtcctcaaacatagccacagtttggtttctaagtaattcctccacatcactctgtctgtctattcctacccaatgtctatcacagacctgaaaaataatgctaaagtaatggagatctctagttgtggggagaaaaagtttattaaaatcaagaagaggttataaagatcttggtatggaattcatggaaataagataaatctctatgcttccattcaaaaagttcatcatagtacaaataagtagagacaaatgatagcattgaaacagaaaacaaattacgtaaaggaggatattcttttttttagccactgaactgtatcgaaattagctagaaaactgaagtacacaaattaatcagccttctaaaagcccaagaaaggaaataacttatgactaagtcctcaaaagcaactgcaacaaaaatgaaaatggaaaagtgggacctaattaaactaaagagcttctgcacagaaaaagaaactgtcaataaacagacaatctacagtatgggagaaaatatttccaaactgtgcatctgacaaagctgtaatatccagaaactataaggaacttaaatcagcaaaaagtgaataatctcatcaaaaaatgggcaaaagacatgaacgggcacttctcaagataagacatatatgtggccaataaatatatgaaaaaatgtacacatcgctaattatcagagaaatgtaaaccaaaaccacaatgagataccatctcacaccaatcagaatggctattactaaaaagtcaaaaaacaacaaatgttggtgaggctgcagagagaagggaatgcttttcttttcttttttcttttttttttttttcacacggagtgttgctctgttgcccaggctggagtgcagtggcgcgatctcggctcactgcagcctccatctcccaggttcaagcaattctcctgcctcagcctcctgagtagctgggattacaggcgtttgctaccacatctggctaattttttttttttttgtatttttagtggagatggggttttgccatgttggacaggctggtctcaaactctgacctcaaatgatccgcccacctcagcctcccaaagtgcaggaattacaggcatgagccaccatgcccggctgagaaggaaacacttatacactgttgttgggaatgtaaattagttcagccactgtggaaagcagtttggagacttctcaaagaacttagaactaccgcttgacgcagcaatcccattacttggtatacatccaaaagaaaataaatcattctaccaaaaagacacgtgcactgtatgttcattgcagcactattcacaatagcaaagatgtggaatcaatctatatgcccatccagggtggattggataaagaaaatgtggtacatgtataccacagaatactatgtagccatgaaaaagaacaaaatcatgttctttacagcaacatggatgcagctggaagccattatcctacgtgaattaacacaggaacagaaaaccaaataccttctcacttacaactaggggctaaacaatgagtactcatggacataaaaatggcaacaatagatactggggactaccagagggggaaggcaggaggaggacaagggttgtgagactaactgctgggcactaggcttactacctaggtgacaggatcaacagtaccctaaacctcagcatcatgcgatatactcaggtaacaaacctgcacatgtgccccttgaatctaaaataagagttaaaattatttaaaaaattttttaaacaaaaaaggctggaaaaagagctttgtacaaagtcaagataagaatgatgcagagttcacacatcataaatgttgtttaaattaatcaatatttcattttcttttttcttttttttttttttgagacggagtctcgctctgtcgcccaggctggagtgcagcggtgtgatctcggctcactgcaagttccgcctcccaggttcacgccattgtcctgcctcagcctaccgagtagctgggactacaggcgcccgccaccgcgcccggctttttttttttttttgtatttttagtagagacagggtttcaccatagtctcgatctcctgacctcgtgatccgcccgcctcagcctcccaaagtgctgggattacaggcgtgagccaccgcgcccagccggatatttcgttttcttatgtcaagatctatcatcaagacaataacttacagagttctgaccatgtgtcacgcctctcacgctaactccatgagacaagcgtgatgtccattttacaaataaaggcaagagcctaaagagaaagtactttcctaaattcagaagaccagttcatacacagctgggattatgaacccaggtctcactggctctagagccgcattctttccactacactacgatgcctcccagatcagccttcactggaacacagggtatgaacgcaaagggaacctaccctcttaggtcagtcaaaggttcaaatccaaaatttataataaaaactcacaaacaaatagatgtgtcaaatgctcatatagatttttaaaattattactctatcttaaaatgaaaaccaattttgagccaaggtcaataacaaaaaacgtggccgttagcactaaagagaagtcttgatgattatctaaacttgcccgtatccctgaccacacagccattcgtccagaaacgattttattcaggcaggtagaaaagagtggccagtttcttctctttatttgcttggggcatttgaaaggtcagcataatacttgtgactcaggagcctgagaaagcgtttgctataatagaatgccaaggagtgtgggggataggaacgtggacaggacagcttggatccttttaaacacctcaatttaatgcaatttccaccaaatgcaacgtgtcaagggcatgactgaatgtggtttcagtgttatactttagaaatgtttcatactgatacatttacaaatgagaagaaatcagttatactactttttcattcagaaaatagccaccaaaactctaaatactaaattcaataaggtttacaatgtataacctaacaccacaaaatgctcaaggaaatgttatcaactacgttcacttcaacttatcaggagccttacttttattttttaaaactttaagagccaaacccttcctccaggtggcagtatataactgtttgttttaatcatttccacaggatctagtgggactagagctttgtgcataatctttcctatattttcataatactacttcctagttttctttgaaattagtgtgaatatcactgtgtcttttgctggtctcagacaacaactcagtatcataagacaggcccgctggccacaacatccttaggctggttggactaaagccaggtttagtgaacaaaactaaaactatatctcaagaagcgtttgtactttaaaatatattttcaatgcaaccacgatatctggaactagaaatctggaaattcagtagttttatacataaatgcacttaatgatgaaatagctcacatcttccctttcttttattaaatcaataatgttgcaactttccctgttttcaaaaactggatgagaagatcaccagattttaagaaaaaaattgcttacctagggctcttgagttctcacaaaatcaggatcatttctttctctgtctcctttgggtggcttggtctgagccaccgtcacgctcttgcctgacgatgactctctacagccttctatgggccctggctgctcatcttctcatgccctatgggcccactcatctgccatagtgagcctttcaaagccgacaatgccctttctctctggggtttcctatggcacttaggctctacatggcctatcctttttccctcccccccaccatctcctgcatcccctctttcgtgccctctccgccaatcctcctcaaacaccaggtaagccacctccaccatggccaccctccccctgcccaggccttagccagctttgttctctcagcctagaacattttttttttttttttgagacagaatctggctttgccacccaggctggagtgcagtggcacgatattggctccctgtaacctccgcctcccgggttcaagcaattctcctgcctcagcttcctgaatagctggaaccataggcgtgtgccaccatgcctggttaatttttgtatttttagtagagatggagtttcagcatgttggccaagctggtctcgaactcctgacctcaggggatccacctgctcagcctcccaaagtgctgggattacaggcgtgagccaccatgcctggccagcctagaacacttgtctgcaaaatacctctatgattccactccctctcttcactcactcaccctgttcgaacatcacattaaaaaaaaaaaaaaacacacaaaaaataaataaaataaaatagcaacaagacccactgcagatgtgccatctccctctctctacttgccccaacttcttgtctctccaggctttgaacattccctgacatattacacattcacatgtatttttacttgtttctgcaaacttgaatacaggttccaccagaagcagaattgttttggtgtatccccagtgcctagaacagctagagtagtgccaggcatacaaatgctaaataaatatttgctagatgatagctgggtgtggtggtgggcaactctattcccagctacttgggaggctgaggcaggagaattgcttgaaccaaggaggcagaggttgcagtgagccaagatcgcgccactgcactccagactgggcaacagaacaaaacttcatcacagaaaaaaaaaaaagtgatatctttatatttacaaaccttaaactgaaaatcagcatttccttttatcctaaatgaatgtaggcaacaaacatagtaatagtagcagtgcctgtgactccgtcacgaatggaaatcacagttattttcatatcatgttttagctgctgctagtgtctcaaaatattatttatgctcatcgttacctcagaacagtggtagctattagatctactgctaggtcttgtaatttaatggtctagctattaggtctatgtctacctattaagccttataatttaataagctaataaataagaacatatattaccaataattcaaaaaatatttttgagaactatttcaatatatttagggcacaggtaagcctatgtattctattttacgcgattgaaaatatcattctgagaaggggtctggaggctccaccaggctaccaaaagtatccaaaggacaaaataattaagaaccttggttgaaacagaggttttgcaagactgtggcatttgcatccttacagatctatgggctggagaccttctgcaacaggccaagaaataataccatggtctccctgtacttaagattcttttaaaatacatatatagctatctgcatacaaaaattgtagatccaaacagactaaagagaccacacaatgggcaaggcttaaaaataatgagtccatacaatttcaaaaactatgtctgaagtacctatacctcttatgtgaaaaatatgaggaacatggaacctggttaggcatgatccctataattcaggatgcaaaatactcattaaccccaagatgcaaaatatataatctaataactcttctagtgttagcaggaaagcacttcccttttttaagtaagaaaaaagggttttctttcctttactcatacagcagcaccaagactggccttttccccaggccagaaaaagaatacatcagccctctctgttaaatgtactgaacacagaacagttactgatttaagtgatagttggaaaagggctcattattttgataatcttctattgcataacgtgctataagtgttacaaaagcacacgctctcttacatttccttaaaagcccttaaaggggcacaaggtaacttttcagataacagaaatgttccaaagcatgatcacagcagtggaaacaagactgtatacatttgtcaaaactcattggattgtgtccttaaagttggcaagagtttccttaaatgtaaagtatacctcaataaagttgactaaaaacacaatttcctactcatttttaaatcatgcttcccttttccaaaaagagaataatacttgggtttaaatgttcagttccgctttctgtggtgaaaccctctctgaagtcactgttattcacacatccatggcaagcagtcagagcccccagaggaatgactaagaacagagagagcacaggaactccaaaatagaggcgccttgctcccaaaatgtttctttcctggaactgacaaacgcaccactttgctaaagagcaaagagcttgtcactgggcttactgcaataacaaccattgtaatttaccaagtaagcatattatctctaatctttgtaaaatcctagaaattaagtattagcatttcatttttttttcttggctagttccatatgattagtaagcaggtctgattcagaaccccagtcccataagtatgttcaaactcaaatatatgtaaatgtccccgagaagctatataaatacagttccaaaagactaggacatagatggcagcttttttcacccaacaagatttgatccagcagtttcaacatggctacggatgtcacacaaaattagaattagcactgttttctgtaacaacaaccagctgatttttaagtcaccaattaaaataaaagactggccgtgcgcagtggctcacgcctgtaattccagcactttgggagactgaggtgggaggatcacttgagcccaggagttcaagaccagcctgggcaacaaagcaggatcctgtctctacaaaaaaaaaaaaaattaaaaaataaaagttcgtcagccatggagctgcgtgcctgtggttccagttactcaggaggctggcacaggaggaccacttaagcccagtagttcaaggttgaggtgagctatgatcacaccactgtactccatccagcctcggtgacagagtgagatcctgtctctaaacaacaaaataaaaatactaaaatacaataaaataaaagattgccaatgcaaggaaagctagtattataataatgactaaagttctatctaagagatagctctagattttgatttgtcatgatagcactgcactgcttcgtgcgtaaacaaaggtgatcattccactctggaatactgagctaagtagggccatctccaccaacttaagggctatgaatgaagctcatttatttttgaactcgttccactccaccaactacaattaacacgagaacactcataatttgaagataatctcccataaagtgtgcttggacaacagtcataacattaccagctcatagatgtcttcctcgggctgtggaacatagagctgcattttgttttctattagaaatttcaggcgcaggtaatgagcagaatgatccagttgatgtgtctgggacaaaaaagaaagaaagaaagaaaatgtctgttcaatagtaaataggcacaattagttctccaccaacatacgatgtattcctatgaccaatagagtttgttgttgttgttgttgttgttttgagatggagtttcactcttgttgcccagcctggagtgcaatggcgcaatctcggctcactgcaaccttcgcctcctgggttcaagtgattctcctgcctcagcttcctgagtagctgggattacaggcgcccaccaccacgcccagctgatttttgtgtttttagtggagatggggtttcactatgttggccaggctggtctcgaactcctgacctcaggtgattcacccgccttggcctcccaaagtgctgggattacaggcgtgggccactgctcccggcccaatagaaatttgatgctgaatgggggtataaagtttctatacttcttaaaaagtttacatcgtaaatgcaaagttttaaaataactttcattgaacacactggtaacattccaagggtatcttaggattcaatggaaacaactgactcacatctccacgcctccttatttgattcattgtgctctctaacactggtaaaattttcaacacaacacagcagatcaaaaaggttcttaaatataacttcatagataggtgattaaagaaaagggtaacaagaaaggtaagaaaatactgtatttacaatgagagaaaaaagctgtgcccaggcaaagttgtttttttaaccacatagggacagtgggacagttgttaacagttcatttgcaagcgagtcagtgtgaagacaaggcttttggacttcaatcttatttatatactccccaagtgagactccctccaggggcagtgctaataggcgtgtgtccaactatggaaacacactgaatgactcgctcaaagaaaacaattctaaaattgaaattttcaaggaccctttagtccaggatggaacaatagattttttcttcctgtctaaaaagtaatctttgaattaattttgaggaataagtaataataccaacatggttttataaatcattctcagtagacagtcaagaggatacagggaaaaaaagaaaatgctctccaaaagttacacagcaacatgaaaatatattgctagagagaaaatgtttaaaccaagtgatttttttaagcatccttatcttttaggggtacatcctaaagcgctaatagatagaaatgatataatgtctggaatttgcttccaaaacaaataagagttgggggtgggagtgagtaaatcgataaaacttaatttgatcattacagatgctaggtgatagatacatgagaatttattacattgttccctacttttatacaaattggacatttttcacaaaataaatataaaacctcttcacattcaaagctctgcaggtgagaattatttcaaaataaataaagttaattttaactggttcagtactctttctacttaccccaccctcaaaataatatttttaaagccaaactaacagcattccaataaccattccagtaatatatattcagttacacttaacgaactcttagatacgccagacaccatgtgcagtagtgagaatacagaaactaatacaacataaatgcagtcttcaggagtgtctgcagctgcaggtaaaagctatgtagatgtggaaggtgaggcagcagtggtttagcattttaaataaatatgtacatgcaggacaggcaacctgcattcttgtaaaagcacatttccagaaagtggaaatgagttcactctgaacacatagcagaaggataaagttttctatcagtgattcttgggaaccccaacctttctcctctcctgagtaatatgatagtttgcagcctgctgtgccagacacagatgccattcaccgaacatgtcccagtgcacctggcttttgtcctttcactgcctatatttgagaccagatgctcaatgtctgacagatccaagattgttgatgtcaaagataataaggctggaggcgaaagcccagggaacataaaacaggaactttttaagtgtgctacttactgctggagaatcatcaagataaataaacaacaacaaaatactaatatttagggtgatgtgatgagcaagaaaagttttcctaagagagatcgaagctgcaaatgtttcccacctacctgggtcctcactgaaatctttaattagaagcaaaaattttggttcaccatctgtttccgactgaggcggaagggaaagaaatgaaatttcatgggttcttagtaacaggaacaaattcacttggaaaccttatcatcatcattaataaacactttgtgggcactccttaatgagactgccactgaaacagactgtcttccagaaatcaggccaaaacagcaacctcacccaagaagttctggttcctgaaacttcagtgtgagagacagcccactgtcaggcacaaatagcctaaggtggtcctggtgtggactgcggagaactgcagcatcccctaaatgctacagtactgaaaacatttatacaaacatgcagagaatgtcaaggcacctcacttgaattgtgtaatgcattgcagagaactaaagaatgataaatatagcaatggtaataagaatgattcttggctgggcatggtggctcatgcctgtaatcccatcactttgggaggccaaggtgggctagttgcttaagcccaggagtttgaccagcctgggtaacatggtgaaaccctgtctgtatcaaaaatacaaaacttagccacgcatggtggggtgagcctgtagtccctgtaggctactcaggaagttgaggcgggaggattgcttgagcctgggagggcaaggctgcagtgagctatgactacaccactgtacttcagccgggggacagagtgagaccctgtctcaaaaaaaattaataaataagtaaaaggaaaaaaagattattgccacaaaccatcatatttttcaaacttctttaagttacaataatgtcttgataactttaaaaaataaaaatcagcacaagcagcaaacatgaaaattataatggtcttacttgtaacttaagagccctaattttggtcagtaaatagttactctcaaaacaggacattggatcaaaatatataccagtgtgtcttactattttggtaaaagtttctgaattatgagcccttgttaatcacggctggtctaacataaaaataaaatcctaatgaattaattaaatcagatcatcagaacgatcaagaagaattttatgctccttagatacctgttagtcaatatcaaagcaagtcaaacaactaaccatgttcagaatacatctttgtgcaaaggaatttcaaatgttaatgaatatttaaacatagtaattctaaatgtgtggccttgctttagacataaaacattcaagtgaaaactcaaaagaaaattgagactcgtaaaacattcaaggaaaattcagttaggaaaaaatttaaatggtataaatttgttttccaatgtacatgtacttaagttacttagcatttgatgcattttgaggcaatgcagccgcaaattataccctaagtattatggtacaacaatttttagtttagttggcataattttttaaattcgcatcttactatgactatttcaaaggatgaaacagcaaaacacaatgtagatattttcagtaaatagtttgcaccaattaaaatagataacatgtctcagaatttactgccttagagctcctaatccattatgttttgctatttttcttcatattcttccatttcagtcaaacttctagaagacatacaaacatgcaattactgcatacacaaatgcaaacatgtagtcactgcatacagaaatatgtatacacacacacacacacaaagtgctattgtagaatttctaaagatattttccctccccttcaaagtaaccttttctttctctaaacgccaatggttatagcatatccaaagccacagaatgacgtagtaaaagcatgaaataaaactgacacatggtcacatgtgaataatatcagtaggtataaatgaatgaaaatatgttgcaattatttttgtagttgtaacgatcagaatatatccaaaacctacagggcaacatggttacctgctatatttagcaacaatcattccagtaacatctgtgacatgaattgtatatgaaatgaagatcttgaaacatttactataccagaacttgactggtgctcagatggcagatggcaaactgatgtgaaatgatgtggatcagatagaataggaaagagaatgagctgaatgcaagagacagaagaaacagattgattattaaatattagagaaagcatctatcaccaaacattgagaataacaataatgaaacaaaagacaggcatttttacaatcatgtttgttttcaatgaggaaaaaaaaaccattcgccattatatcagattgttaataacatgggacactgttttccccattatctccttccctcttaagaataaaatcagatccactaattacaataaggtgttttccaaggaagaaacaagctttagaaggcacctggccctgagcatactatatcacttttcctacatgggtgcttttccaaagaccatcaatttctgaaatgcacacacaagtcttccagttttaaactcatgagattttttatgtgtgtgtatttttagtacagatggggttttgccatgttggccaggctgctctcgaactcctggcctcaagtgatctgccctcctcagcctcccaaagtactgggattacaggtgtgagccaccgtgcccggcataaactcatgagatagaagcttgttccacatcacgttgtttttgcttttatttctatgtcttgggaaaaagacctgaaggcccagggaaaattggacaggactaacttttactgttggagaaagggattttgtaccttaatgatgccatcagaaacctttcaggtgacagaaataaacactttaaaggggatcaggtccactacattatctagatatggtctctaactgtcaatgacaatactattcttcattcccctagtttcttccaaagcaaaagcttgaaacatacgtaaagtgggccaatcattcattgcttcactcactgatcaatcttccaccaatcaatggtaatcggaaaactttggcttaaccttcgattcctgatccagtttaaagccaatgtgcacaggatgctccaaagccatgttattcttctggaaacaccttccagagttcggcttatacaaaaaagccagaaagttctacttttaacaccttcatctgcagatctgacaataactcttcagctctgcagaatgttaatgggtctctaaagaattgtgctaattataaataaaggaatgcagaaatcctctacagaccaattttgttaagtaattaacatgaaaaaattgtgaactgagataccattatctccaaaagctagaaccctcgtacatgaaggattcaaagcacacagagaggtgataccatttatttttagcatccatgtcagggctgactttagttatggcccaaaacaagtgattcttctatttttcctccacatacataagacattttaagaggctaatttgagctgaactgtccatttctctgattcatatgaagagccatgttttttctttaaaaagccgtctgtgatttgcttttttgaaaatacaaaaattgctgatagtagaactacaaaattgaggtacttgcggaggtagtgaaagtcattcagtatttacaaacattgtgttgaatgatgagatctttaaaacgtcatttcatccatccaacttcttctaggataaaattgtgatagaaaagtttttcatttttttttttagcagccccaaagaagaccaattcactcccctaagaatatattctagattcttctgagccttactgattgtccttcctgaagactaacccaggttctgagagttcttgtggacactcggcactgcaggatgcacccagctgtagagaagccagacgtgggttcagtctctcctttgcaactgactgtgatgtgagttcaggcaagcagctaaggccctctgagcttcacttcctccatgtgtacaatggcaaagtctcagctctttctcaggctcagacctgatacgactacgacatagaactattaatgctattcattatgtaaaaataaaaacaagcatgcaagtaaagttcttctttcctctctctcccctcactcaagaccattcacctggctgcccttcacggggaaaaatgaaaccaggttcactttgaaaaagatcaaggcatttcttccatggtttaaggtgaaagagaaaaggagctcaatcatttgtcatgtttctaaaaaggctaattctgtgttcacaaaagaagaatttcccatcaatggaggtcaaacttatatttccttccattttccccaattctaaagatgcccatagtgtatcggttactgattaaagagcaggtgacagaacagtacccataatatgatgccattgaacacatgtatctgtatgtgtgcggaaaaaggaatgaatggtcaaacgccaaaatgtttgcaatggttatttctggatttcgtgaataagagtggccttaattttctgttgtgttcttcacctagattttctaaaaggtttgcaatgagcatgtgatacatgcattagaaatctatcaaacacacacattgaaagatgctacttagaagagttcctctcttcccaaaggtgaagcattcactaatataattttgaatactatcacaaaggaatgcaatgctgctccgaaatgaaagggaggtgtgttttaagcaccttcctctcccacacggctctgggtttccacatgtgccttagaagattgctacaccccattctgctcttcttggagaaacaacccaaagcagctccataccttgcaaatcagctccagggtgtcccgtgcagtgtcgcctggccggacgaccgtcagggcaggctgattattgggcagacagaaccaggatggagtgaaatactcgtggacccaaatgtcgcagtcagggttgtgctggtgaacgttaggtaagaccacttctttctccctctataacaagaaataaagttagcagggcagcagcagtggagctctgacaaccctagattcccagactgcacacaggaatcaccgattcccatgaaaacagcccagggcagaagcggaggcagtggtgggaggcaggggaacccttggagagagagaaactactgagaaagcagatttatggtgcaatggagagatttcaaacttcagctgtgaggcaggcttcacaacccacagcatccataggtgatcacggcatgaatgagtgggcatcaaaatttggaagaaaagaaagaaagagagagagatagggaaggaaggaaaagaaagaaagaaagaaagaaagaaagaaagaaagaaagaaagaaagaaagaaagaaagagagaaagaaggaaggaagggagaaagaaagaaagaaagaaagaaagaaagaaagaaagaaagaaagaaagaaaaagaaagaaagaaagaaaaagaaagaaagaaagaaagagaaagaaagagaaagaaagaaagagaaagaaggaaggaagggagaaagaaagaaagaaagaaagaaagaaagaaagaaagaaagaaagaaagaaagaaagaaagaaaggtcaccattcagctcagctttatggctcttatttcttccacaaactcatttcaagtttcaagcagggaattcctacaacaagcacatctgccatgagaactttacagttcaaagcaatggtgaagccccaatcatttttttttttcaaaaagatcatgttttagcactacatatttatatttatatttatagacagcatcatttttgtgctctccttggaccttcagcacgacccggcgccagagacaattcagttttctggaggtcaaagaacttgacggataacatcatggcacaatgtagcaaaaacaagcctcctttgctgccatcactgtatcctctccatcactgcctgaggaccagggagtggaatgaagtttgtgaatgtgggagaagggtcggaagtcctcctttagcagctgggttaaacctaagcaagctaagcagatgaagcagaggatgttccttagcttgatataatgttactttccttagattgatacaatgttaggagccccgcgaaataagcaaggaaagaatgatgttagatttcagcaatgtaaacataatattgatgctcaatatatgctaagtaataggccttcattattgatttataaccaggccactagttggtaaatatgtatctactgatgaccaagaacaaggctggtatcagcaaattacaagaaggaacaaatttcccaatgaaggctgagaggtggtaatataacctccattcaaaagaagaatggaatccaagaatgggggaaacgttttcgtaaaagccattcaactaaatccaactggggaagataatttcagcctcgcctttgaacagagttgctttagcagataagctggactccagggaaggaattgtcaaaaagcaatcaacatacctaaatcccattaagtataattggaatattcagactctgttccagtgtgccacattaaataaatgccccttagcactggatcaacccaagttttgcatctaaacactctgagaacaaggcattctagccaggatgtgggagaaagacgtaccttagaaaaatggaaaaccaaaaatgctacacagaaatccaatggaaaaactttcgcagtttccaagttctgtggtctagagaagatatctcagtattaaatgtggactaataatggtatgcaagatgaactggccaacctcagaaatgaccaagttaacatcaaaaactatgcttggattgcacataggcccaaaaactgaatttcttcaaatttcatcagacagagatgctcagacagtggccatggatgagtatttccaaggacagtggcctttatatccaggatagcatcattcatgagtagtttgtgtatgaaggaaagaaaaggccttcccatggccactcttctctcttcccctccaatagcagaactccccatggcactctggattctgaagctcagctccatctacaacatggggctgagccactgatgactgacactacttggatgcatggcaactgagggctgaattctgtcatattgattctgagcccaagaaccagaggatcccaccaaggtcacattatcaacatcagaccatcccccatcccccacacaaacaggctcccagtatcactactagggtcttgaaaacgagagacgtctatttatttagaggctgaaaaaagtggccaattaaaaaacaaatcagtatttttatgggctttcaatcagagcagtttgaaagcccctgtttaaatccaagcacaaggctgaaccaagcctgtgaatcttttttttttttttttttttttttgagagagagtcttgctcggttgcacaggctggagtgcagtggctccatctctgctcactgcaagctccgcatcctgggttcacgccattctgctgcctcagcctcccaagtagctgggactacaggtgtccagctaattttttttttttttgtatttttagtagagacggggtttcatcgtgttagccagcatggtctccatctcctgacctcgtgatccacccgccttggcctcccaaagtgctgggattacaggcgtgagccaccacacccggccgaatctttaattgaatacttgacttgggaggcaaatgcgtttttgttgtttttctttttttaaagaacacgctatcagaacagttctttgaaactaatgggagcaaaacagcatgtgtgggcagagagggagggtagtaagaacacacctcttgggaagagaagttgtacatggaaagaaattggcaatggcataaaatattcagctattcagaacccaaatttcctcttacattctagttagaaactcacacatcaaatggtaagtatgggaaatgttatgtcagcaggagaatgttccctctaccactcagttttaaatataaaatgattttccatctcttgttgacttattacataacttttaaaaactgatttcagtttttaatattgagtttacttaattttagtagctcaagacaacactgcaccatgtatatgttgatgcacttgtggtacttttagaaaagaaaacacacgtttatttttaccttgccatctggaacaatgtcatcaaatattccctctaaagatttctttacagcttcggttccctctccaaacacctgcatatacaaaagtaccaccttaaaaaggaatctgggcaacagggcaaacgaaacgtaggaagggggaaggaaatgggcatggctatgacaaaaccttacacacgtgttcagatactcctacatcaaatcccaaagcaggtacaataatttatgggagcagacctggaaaaacacatccctctatctagatcacttccctacgtgtttgacagttggaaaaaaaaaagtttgctctcaaatatggataattcatctctacttaaagaaaataggctgggcatggtggctcatgcctataatccctagcactttgggaagctgaggcgggaggactgcttgagcctaggagtttgagaccagcctgggcaatatagttagacctcatctctacaaaaaaaaaaaaaaaaaaagaattacattaaattagccaggcatggtggggtgcacctgtagtcccagctactcctgaggctaaggcaggaggatcacaagatcacatcactgaactacaatctgggcaacagagggagaccttgtcccaaaaaaagtaaaaagagaaagacaataggttaggcgtggtggctcatatctgcaatcctagtactttgggaggctgaggcaggaggattgctccagcccaggagtttgagaccagtttgctcaacagagtgagaccctgtctctataaaaaatttgaaaattagccatgcatagtggcatgctcctgtagtcccagctacttgggaagctgagatgggaggatcacttgtgccctggaggtcaagtttgcagcgagctgagaccacactactgtactccagcctgggcaacagactgagaccttgtctcaaaaaaaacaaaaaaataaaaaaccagaaagaaaaagaaaaagaaaaatataaataaaagaaaagaaactagcaaaagcaatgagctagataaactcacaatgaagcatttctcctatagcctcatatacctgaccagatacttataagtaaaaatctgcttgctttgtaatacattcttaagtagaatgtgagaatattatagttttttacctcaacatggcaacataggggtttttttaattaaaaaatagaaaattgtctcttccttgaaatgtaatcaatcctgctaacttaaagatgccatgaaaattagaatagggtaacaatgccactaggtaaggaaactcatggacatgaggaattttgtgattatccctaaaacaagaatgtagtatcaggataatgtacacaattgagaaaaagcctttcctccatgcaaataaaatatacaaaaacatacaatgtttttaactttttttcggtagagaaagcatgttgctatgttgcccaggctggtctcaaactcctggcctcaaagaatcctcccaccttggcctcctaaagtgctaggattacaggcatgagccaccaccccggccaaaaaaacataatttttgtccatttcaaattatagaattaatgactaaattcctactggtatgtttatggctaagcaaaaggttcttaaaaactcatacttttagaaaaaatacaagaattgtttctaagacattacattgtgctttgattttagaaaaatgttaaaacattctcttgaattcatttaaattcagtcatatatttcagtagaaaagggcggtaacataacctggtgccaatcaagcagaagcacatgaacaaagggttttgttagaaaacaagtccaaactgtgaagtccagaagcagtgggctgagccatctctcagggcagaagacacatacacaatgacaccaccacctcccaaaagaagaagagaaatgggccaggcgcagtggctcatgcctataatcccagcactttgggaggccaaagcaggcagatcacagggtcaggagttcgagaccatcctgaccaacacaaaagttagctgggtgtggtggcaggcgcctgtaatcccagctactcaggaggttgaggcaagagaatcacttgaacccaggaggcggagattgcaatgagctgagatcgcgccattgcactccagcctggggcaacagagtgagactctgtctcaaaaaagaaaaaaaaaaaaaaaaaaaaagaagagaaatgctgatggttcatgtcctcctttttgcaggttttaactgagaaccatcaagtctcttttgttatttttctgatgaaatgttgactttcctccacagttttttctttagatttacataaaagtaaaacccatggaagcaagctcaatgatctactctccccaaagatcacaagacaaactgcgaaactgcttcagtctcacactcgcttagcatttgctcatctgctctccgcaggttccatcaaggatagggaaatgccacattaaaacagagagtatcagccaggcacggtggcccacgtctataatcccagcactttgggaggccgaagtgggcagatcacttgaggtcaggagttcgagaccagcctggccaacatggtgaaaccccatctctactaaaaatataaaaataataagctattagctgcacgtggtggtgagtgcctgtaatcccagttactcaggaggctgaggcaggagaatcacttgaactgggaggcagagggtgcggttagccgagattgcaccactgcactccatcctgggtgacagagcgagactccatcacaaacaaaacaaaacaaaaccaaaaaaccaatgagtatcacagtcagctaagggactcagggcatcagctttcaggactaatctcttttctaaaattcatttcttaagtaaattaatggctggaactgtccgagcaaacaaggagagatcattctatcaagtcagtcgatgacgtcctctcacttttcacaagggcatgcggtgaataggtcaaactagcagtcttagtcatgacctccaaaatgctgaaggcctgactttccagccaccgcagcccacaaactggacattcttcttccgaaagactacagatgctcacgttcctttagtccctgaaatctaaacaagcagttctggagctactcatttctcaaagccgaacgacaaggaagacagtaacaacagacagtgggcttcacggaagtaaccccagcaggagactggccttggcgagtgaagaagtcaaatttaatgggcaagaattgggtggctgtacatggtcagtggacacccgtcacggcaccaggctatgttgcgccctcacgacataccgagatcccgttccagcccctggacctgagcagaagggggctgtggcagtgggcgagctctctcggattcctgtctcctcattccagtaggcagaggatctgcccatttaatgtcagctccaaaaagtcaagggcagagaataatcagaattccctggaggctgcctttcatccagtgccagaggcagcttaaaaagtctctgcatggccaggtgcagtggctcatgcctgtaatctcagcacttggggaggctgaggcgggtggatcatgagggtcaggagttcaagaccagcctggctaatatggtgaaaccccatctctactaaaaacacaaaaattagccaggcatggtggtgggcacctgtagtcccagctactcgggaggctgaggcagaagaatcacttgaatcagggaggtggaggttgcagtcagccaagattgtgccactgcactccagcctggtgacagagcgagactctgtctccaaaaaaaaaaaaagactgcactcaggtacccacttggcttcattgcagagccctgctttttcctgaagactcagggtgaattgtgcgctttgagtaggtctgtaattaatgagggtttggaaaggatgcaggtgggaaactgcagcttggtgatagactaatagcagagttcaatgttatgggtatgcattatctattaaaagtgtctagcacagctagtttctttgtgccaactagttgattttaaataacactcggcctcactgaagaaacacacacaccccaaattgaggtggccacagaagtgatttgtgcgggctcacttttcatctgctctggaacctacctgattgatgcttggccgtccctgcttctttttggaggtagtatccagaccccacagagaagaaaacctgctccttcgcttgctcgcggatctggacatggcctgagtacgtcttctcactccagtttcaccagtgcgtgctgccacctgaggatggcaaggacaagcagccacaagggagatgcatcaggaccacccacttgtgccttgaggtccccgtaagtcccacccttcaaaaaaccctcctccatcatgccagccaaccctgaccccaatgcctaaagtattcaatccatgacccagacatattgggactttgagagcccttcatggattcagaatggaaatgaaaagctggcaaattcaatccttgtttgaaatcatcagcaaaaatacataatataggaataaaatatatgttctgtttccaaaaatgacatgtccttctggtcacaggcttgaactacagcaagggaaatgagccaggctttctctccaaatgctacagagctgtttctgcattctattgaaaaatggtgctaaagcgtcagcaacaatagtggaaaaacaacagattttggttcctgggtttccaggttaaatctaaaattaccaatctctactattttgttttcttaggatatataaaatcacgttttaaaatcagacgagtgatcattggcccccaatatccattctctattccatcttagtcagaaaaatctcaaatgtaggccaggtgcggtggctcatgcctgtaatcccagcactttaggaggcagatgcaggcagatcacctgaggtcaggagttcgagaccagcctggccaacatggtgaaaccctgtcttaactaaaaaatacaaaaatcagctgggcacagtgacaggcacctgtaatcctagctacttgggaagctgagacaggagaattgcttgaacccaggagatggaggttgcagtgagctgagaacacgccactgcactctagcctgggcgacagaacgagactctttctcaaaaaaaaaagcggggggtggggaatctcatatgtaagtgagcatgcagccactgagtccaagatgacttattttccttgcagtagggcatggattgggcttaagtcctggtcaatggcatacaagcaaaaaatatttgcaacttccaggaactgtgctcaatgggagggggctttctgttattctttccgctatcctatctgttttctttttcctgataaaaggaaggtctgtgttgtggtctaggatgtccctacctaagccttttcaaggatggcagaataacaagacaaaagggactgggctcactgaagatgaaggcaccttaccagacttgcatcacttacatgtcctatgtttaggtaaatgggaaagaaaacttgtatttttttgttgaacaaaagctaaactctgtcgaggtattacaatgtgccagcaacccagagaagcatttcctttttttttttttttttttttttttttgacggagtctcgctctgtcacccaggctggagtccagtggagcgattccagagaagcatttcacaagggaacaccctaaatgtaaatctgtcaccaggataattgctcaagtagaatctccacaaggactccagaaagtcctcccaggcaaaacattcaggcttgaactttatcctaccaggtggcaagcaaagtcccaggaatttaagggaacttctgccagaaggtctccatgggccacccacccgctcgcctttcaaaaaagggagtggcaggaggaacagcgagtcagacttgaaatgaaacttctccacccactcttttgttgccagaggtgaatgtcttggaacctacttgtagattcccacacaggcaactcccaatgtgacagatgccaattggcagcaatgcaggggatgaggcactgttggtaacatgaggggcctccccagcagtcagcgtgttggttggaaggcacgcccctctggggcttcagtactgacaatgtaaacaccgcagaagccccacgggtggcagggacccctacgtacattaaaaacaggaatcaaaacggcttctctacaagggtattagagggaaggtttttggacccaaacaaaaataggaagatgagggagctgagaggtcttgcattttgcattttctcagcttagcacgttaaaaaaacaaaacaaaacaaaaaaaaaccccagatcagggcatagaaaaatgtggtatccaagacactggtgagaattttcatgagaaagatcttaatctaagattacaccggaggtgtcacagggaacaaaatcacaagacaaacacaccgtaaaatatgtaaaaattttctcttctctattttcatcactttctcagttaaaggtaaacaaaggttgtaaaaggaataaattataacatgcagacatgcatatgctcacatgactatgtcaacactgaataaatggtgttaaaaatttttaaattctagaggaaaaaaatgtccatttggcctcacagtcatatagtcattttataaataaatccagtcattaacagtgacacatacatagaggcaaccgtataaaatacgtcgacatatattactgtttgctttcttcatacacacagcaatacctgtacttactgtgtctagttaattgtttacttatttcttacccttctctcccacaagaatataagcttcaagaggacaggatctctgcgctgttcactatagtcctaatcacaaggataaaactgacggatgccaggcacttacatacatttgttgcttgaacaaataaatacataaataccacaaagcaaaagcacatcctatataacacggtgacaacaatgggtgcatcacaccaacacggcacatgtatacatatgtaacaaacctgcacgttgtgcacatgtaccctagaacttaaagtataatgtaaaaaaaagaaagaaaaaagaaaactcttcagtttacaatttccagacaaagacagcatgaaagagaaattcatacacccataaatattctcagttatcagctgactagttagtttagtctgtttaacaaacactttacttaagtttcttataagcagtaattctaaattgcttggggccttgtaaactgcaaaagtaaccactatccccaagacaataatgactcaaaatgagcaaagggatttagaaaaagggctggcagaagaactgctggaccagagctcaagagtttcccaatgatctttgcccagacaatgcctccctttgtggcctgaacctgattactctatcattctgctcatctgtgcaaacaagaacaatgataaccttctttcaaagagtacagcgaggacccttcagttaattactgcaaatcactcagcattatgggaagctttctcagtgaatgctacttcaattgtagctccccaatctacccagccctgttaccctcacacctcctccttcctcctcccccactaaaaagaagaaaaaaaatttctggacaaagactaaattgaagaatgtttcaaccccaaggagaaaaaaaatcccaggggtcaaatgacaaggagaggagggaaagaaaataagagttcctaataaatcagactgcaaaattccctgcccgggatcttccacaggagctaaagcaacaaataggaacagacacccaacaggctcgcctgacttgttccggctgaaatgaaacccctcatagaaaagagaagttgcaggaacatattgaaacacccagacttgtatcactgacaaagcgagcaaaaacccaagaaaggaacagagagttgaacgtatggacttcaatgttctttaaaaccactgaccaaaacacctcagagtaactaactctcccatccccatcttcagctggccaaattttaatagcctgcccccctgaaagaaaagtacacacacatcacagacattgagatgaaggaaattagagggtccgaagatgaattatggaagagtaaaacggtaaccttctcagggaggctgcgcccagtggctttgaagaaaataatgaaagcatacaagttttagggagaaagcaaaattattttctccaaaatctagcaaggtacagtaagaggaggaagccacttcgatgctccgggtttggtattaatacagatggtacctcgatgacatcacgagttcccttcataaaaatgcgtcctcaatggatgatattctgacaaggagataaagaagaatttctatcctagtttttttgtttatttttgttttgcagaataggcgaactgagatttggctaagttaaaaattggtgtccaggtctccaagaaatagatctggagtcaaaaactgaaaacgttttgtaagtttattcaacacagcactttgtcccaccactactgaaaaaacaggatttaatagctgtatggagaggtggtagccagggagaccaagagctgagctgtaattagcagaacaaatcaggatgccagttttaataactccagaaattggtttaagacttctttaaaaatgtaaatctacccctaattatctgaatgatgatgctaatctatttataaagaatacaaacgcctctgactgaattatagctctgaatgcaattgaagggtacagctgacaaagcaagagaagaacagcacagctaaggttttacaaagcagtttctggaacctgagacttaacatttaattctctagcaaatgtgctaaggtgcagtacattctaagtgggtgtcgacttggaaagactaaaaccatgttactcatacagcaatttttgagaaggagccaaaagtacacaaagctgctcgcaatttagcaagtacatgaaattacagattataaacacacaacacaactatacaatctgccgctctagaggtcagatggaaattcccttcctcaagcaatgcatatatgttcagctggcgaatcacagagttcttcgccttgctctaatgcatcgggtattcgtggtcatcaaaacaatggtaaaaataaagtgaaatggagagctccaaagagatctgtgttccatatatggtgtatgtgtgtatgtatgtgtgtgtatatatacatacatgtacacatacatatatatatatatatatatatatatatatattttttttttttttttttttttttttttgagacagagtctcactttgtcacccaggctggagtgcagtggtgcgaccttggttcactgtgacaacctcctcctaggttcaagcgattctcaggcttcagcctcctgagtagctgggattacaggtgtatgtcaccacacccaggtaatttctgtacacttaatagagacagggtttcaccatgttggccaggttggtctcgaactcctgacctcaggtgatccacctgcgtcggcctcccaaagtgctgggattacaggcatgagtcactgcgcccagcctgagaatgcattgatgtatgagagtgagcactccactcaccattcccaccaagtttatataaaaaatatgtatttgggttccaaacatgacactgtctaaagatgacaagagctatcaacaaatactacatgtgaacagcgctgaagatggtacccttcatatttcctttgcacaatagcttaggcccccccatcaagagatagatgcttaagtaatatattccagacaggtttaaatggaaatttgcatccactgcaaagggagggcatttcagaaatccatacacagcaggaagctcgaaaaacacttaggagactcttgtcaagtcctgctcaggattaagcgtcaagcttaatgtttttcaaaaattcattagcttctactcaccagggcatgaaacgatgataccgaaaagattccaaggcggcccatggccactttcgttggtcgacttgcaaaagcgagaagccttttggggtttggcagctccccaccctgaaggctggctaaataacagcggaaacgaaacaggtccatttggaactgctcgagattttgctcccagacaaagatctatggtagtgaaaacacgggaaaagaaaaagtgagaaaatgggaaacaaatgctaatatctttatcctatacagatctatatgtcgtaaaggcattcattataatcctaaggaataaacaacaggtacctaagtttcttagttacttatgtttcttctgcaagatctatagccataaattcagcatcataaatagaaagtgacaagttcctctgttccctcctatcttggagttcgtactgggggcatgataggtctatcaactccaagatctggaccacaaactctagactccagaagtaaaaatgtagagatttccatcaccaaagaactatatgacttaacaagaggtaggttttcatacaaagaaaagtgagacgaatgaaaggctagaagcaatggaccaagtgcttttgggaagagcggggtagcccggaacacagggtggaagtggaacacaagatggtggagacccagactctggaatacaaagttccaactgtagcatgtctctgagacattcccttatttttcaaagtggcaaaataataactacctccttaggctgttgggatgtttgaaaaagataatacaagcataagtacaaggtctggcatagagtgaaggtgcagtgatgctgacaatggtacagataatgaggaatggttgaaatctccctttttgcttcaacaaaatatatatcactgtacacacatgttcatagcagcactgtttgcaaaaggtggaaacagcttgaatgtccatcaagaaatggccaataaacaaaccatggtgtatacgtacaaccagaacccaggagtaaagtgctgatgtatgctaccatgtgtatccacctccaaaacatgaagctcagggaaggagccggacacaaaaggccacgtactgtgcaattccattcatatgaaatatctagaataggcaaatccatgaagacagagtgccgggggcagagaggagcaactgcttcacaggtacagggttacattttgggccagattaacaatttcagggctagatgggggagtgtttgcaccacatggtaaacgtactcgatgttactgaattgttcgtgttaaaatggttgattttacattgtgtgaattttgcctcaatttaaaaaaatacaatgtcaggtaacaaagggaaaccccagagggagagaaatgtggaaggcccatgtcaattgttcaatgatttaaatatcatttattcatgtaattatttcctgagcattaggacaaagtgtcaaagcactaccagatggctattactgacagctgaatagcaggcaaaaatgtgctttgttcatttcactaaatcttttttctttagcatgaaatatacttatgcacatataaagcaattatatatctagatctagatagatagatagatatatctctctctatatatatctatatatatagagagagagcttgctctgttacccaggctggagtgcaatggcacaatcttggcccaccgcaccctctgcctcccaggctcaggcgatcctctcctctcggcctcctgagactacagttgcggctaatttttgtattttttttgtagagatagggttttgccatgttgaccaggctggtcttgaaatcctgggctcaagcgagtatgcccacctcagcctcccaaagtgctgggattacaggcatgagccgccacacctggccagatatatatttttaatgtacgttaccttttccaaattaagaattcaaaatttactgaggagtcagaaatgagtccccaccataagagaactccaagtcagtctgataacatgggaaatgaaattgcaaactttctaattacacagatcccctagaagagcacatcattgatgggggccagggctcctctactgggtttctgtctttcattcaatgtaatattgttccgtttagctattaacaatcagctatgaacaaagggtgaagaacactgacagtcacagtaaagaacttagcatcctggatgacaggctgtcgaggagatatccgatgatgtttcacgattccaaaacagcaaaaaaaaaaaaaaacccttttagagacctaacaattttgtccggacctaaacacggaagaacgattacctgatctaatattgttttctttttctttgagtcagtgactgaagacagctgcatttcacccattttcttcatcttttcatccatgtcaatcttctgttccagttttttgatctctgatttcaggagtcggagcgtgtcttccttgtggtggtgcctcgcgaccgcagtggcgcaggcagagtggatggcggtgatccagttttcaagctccgtctggctagtggtctgtaccaggaagaaggggcaggaagaaaaaggcacctcttaggaacttaagagaaatgaaccggagcatttccagagaagcaatgcctgggagtcgaggtgacaggtctagacacccatggataagaataacctgacctcctctttcttcaggaaatcagtaacaaaaagtgagtctcaggtcagatgcccactctcccctcctccctttcaagggctgtcctgaatgaagccaccatgtctgctcactcaatgtacttactgaactcacttgtgaaagtgatactcctaacacacaacttggtgtctactcacgagggttgctgtgaagcaaaggtcagtttccagataggatcggtcagttataggacatgagtgggactgagggacattactgacataggaagctacaacagccctgcccctcgtgaaccactgcaacccaaatccaaaggtcctattcctggtgctaagcagcaagacagaactagggttggggaagtggtcaggtagccagaagaaataccgtctttggggactctatggaaccctctaagaattgcagccgcccaacaacactccatgtgctaaaagtggcctgtttgagaagggcattaagaaaatggtgagcgacacccaccaatggtgacctgcatgggattggtgtgactcggtgttctgaaaggcaaaagtcagaatagttttcaagagacagcacatgtgataactcgctattaatgattctttaggaattcaatcaatgagtttttacaagtgaggagatactggacttttccagatactctcttaagcccagagaggtgaaacaaatgctcagaagttagcccatctcaagaaataatctattcagccactacaatactaaaggagctactaacattatttttcatgcacaaaaacacttcattgttttttctcctttgaagcgccttcttagttttctaactaatttgagtgatggcttgtatacaaaattctgtgttttttttttttttttttttttgagacagggtcgtgctctgttgcccaggctggagtgcagtggcgcgatcttggctcactgcagcctctgcctcccaggtccaagcaattctcatacctcagcctcccgagtagctgggactacaggtgtgtgccaccatgcccggctaagttttatatttttagtagagacagggtttcaccatgttgcctaggctggtctcgaactcctgacctcaagtgatccacccgcctcggcctcccaaagtgctgggattacagatgtgagccatcttgcccagccacttgtaaacaacattctattaacaggaacccaccagcacatgacactgtgctggctggcagctggaatttaagtcaagatagtactttatctttattatttctgaatctgatcagttttgtattccacagaagaaacagcatcaaatattaaaaatggtgtcagccaacaaagtcacctcccactgggcaaacctaactggtccagcagttgttatgtggataacaaatattttgcctgtggataaacatttcaatatgctagacaatctgaagaagaaacagcagaagtaccacctgataaagcaaatggaatcactttgtaaagactgagtgggaggaggagaggcgataaagaaaccggaagccacaggtgaggacttgtagattgagaaacttaggaggaaaaatgcatgtctatttatgagattaaatttgcttcactttattttatagttgtctcctctttgcaggtcattatcttatagtttgtccttacatatcatcctgaagttccaccagaaaaagagaggctctcctgcatctaatgagagcaccaagcttgctcctgctgatgtactgtacaaagcttgatcattggatctcccagtgcctcacaataaatgggtatctcgttaggtggggttatactcccagcccttttttttgagacggagtctgtctgtcaccaggctggagtgcagtggcgcgatctcagttcactgcaacctccgcctcccgagttcaagtgattctcctgcctcagcctcccgagtagctgggactacaggcatgtgccaccacgcccagctaatttttgtatttttttttttttttagtagagatggggtttcaccacgttggccaggatggtctcaatctcttgacctcatgatccgcctgcctcagcctcccaaagtgctgggattacaggtgtgagccaccatgcccggcctcctttttttaaaaaaaaaaaaaaaaaaaaaaaaaaaaaaaaaaaaaaaggaaggaaaaaaagaatccaagatgaaaatacccagtgttggcaaagatatggagtaaccagaactcctatgcactgctggccactggctggaaagtaaacttgtacaactgctttagaaagctgttggatattacctactaaagttgaatatatgcataccctgtgacccagaaaatgcactctgggtacacactcaagagaaatgcactcatatgcacacgaaaatatacacacaagaacatgcccagcagcaaatcatgggtgaaactggacaccatccaggtgccaccaataggggaatggatgaatatgtgggataatcacacaatgaaatactatacagcaagaatgaaggacctataactatagattaacacatataaactgggcacacatcttgttggggaaggaatcagatgcactgcagtatatactgtaggattctatttatataaagtattgtattagtccattctcatgctgctaacaaagacatatccaagactgggtaatttataaaggaaagaagtttaattgactcacagttcagcatggctgaggaggcctcaggaaacgtacaatcatggcagaaagggaagcaaacacgtccttcttctcacggtggcagcgaggagaagtgcagaacaaagcaggggggaaagccccttataaaaccatcagatctagtgagaactcactcactttcacaagaacagtatggaggtaaccgcccccatgattcaattaccttccaatgggtccctcccacgacaagtggggattatgggaactacaattcaagatgagatttgggtgggggcacagccaaaccatatcaagtatcaacacagataaactaatatacagtattagaagttgagagggcaggtttttttggtgggatgagatgcaatgggtagaatctggtaagaagcacagtaaggtttctggagtgctggccaccttctgtttcttcatctgggtgctagttacatggtgctgggtgctggtgtatgacaggggtgtgttcagtttgttaaacaccatcaaaatgtgccttttctgtgtatacgttaaactatcatagaaagtttcaaagaacatccttccaaggtatattatcctaatatttgagtataatttttctataactatgctaaaaatatgatacctcatattccggttttcattaaaaactgtccttacaaaactacaaaggaagttccaaaaagcttcacccttctccaccatttatttctttgtcctcccaagtgcctggtagtacctgataaaaagctggttccttgacccgaaacatgctttccattttgtttgtatcgctcagtggaaatgaggagcttttagattttaggggagttcgtgtcttcacccccccttttttttttgagatggaatctttctctgttgcccaggctggagtgcagtagcagtgcaatctcggctcactgcaacctccgcctcccaagttcaagagattctcctgcctcagcctcccgagcagttggaattacaggcacctgccaccatgcccagctaatttttgtacttttagtagagatgaggtttctccatgttggccaggctggtctcgaactcctgacctcaggtgatccacccgcctcggcctcccaaactgctgggattacaagcgtgagctaccgcgcccggccatcttcacccatttttaaaggataatgtgtgggcatccagatgcaatccctgcagaggcgcacgcagcactaaggagaggctatggttcctgcacaaacacctggcaggtggaagctcaggggcggtccacatccatatcttcaaggcaaacctctctcatctctgcctcagttagaacctcccagcccctaccctcaccccctaactcacagagtaagaaaaggaaatacctacaaccctgacataatacctgagtaatggatagaaagatctgaaatttctgacagcaagctcggctgaatatatgttatgaacttaagaatttaaataaaaatatttatccagaagggactcagatgaccatttttcacagatggaggaaaaaagcccagaaaaattaggaagaacacagtcatttattataaatcccaatctccaccaaccctgttcttaaaaaaaaaaaaagttttggttctgttttttccttgtttaatatgacatactgatcctgacccccagctcttgttaattgctctgaaagccaggctgcagagtcacaagcattacccattcgataattattattttttagacagaatctcactctgttgcccaggctggagtgcctgggcatgatctcagctcactgccacctccgcctcctgggttcaagtggttctcctgcctcagcctccctagtccctagctgggactacaggctactagggagccacacacccagctagttttttgtatttttagtagagacagggtttcaccatgttggccagtctggtcttgaactcctgacctcaagtgatccgccagcctcagcctcccaaagtgctgggattacaggcgtacaccaccaagcccaggtaatttttgtatttttagtagagaggggtttcaccgtgttggccagggtggtcctaaactcccgacctcagatgatcaccctgcctcggcctcccaaagtgctgggattacaggcatgaccattcaatattttgagctcttctcattctaggaatatgggagaatagaactttctggccccctctgaagccaggcatggccatggcacttggctttggccagtaaaatgtgagtagaagtgacatcactgctcaacaaaagcctgattcgccccattcttgccccgttgccacggtcacagaagcactgtgtcaagatagagcttctgtctgcctggatccataagagtctaggatgagtacggctctggagccagcctcgatcatgccaggaaggagaaagcatgttaagccgctgagatttaagtgctcctttcttcagcctaattctatccatcctgactgatctaccagcaaagtaagaattccactgcaaaacaggggatgcctcaaacataacggagtctgtgtagtgcacttggaaccccaagaaagaccataatctgatatgttctgtggaactgcagccttttgctctccttatttaatgaaagtgggtcttctttcccctgtgaggaccccagcccaattcagccaatagcaacacaatccattctgatgtcagagagttcacgtttgtcttccacgtaagaaggaaaaacgaaggaagctgaccaaagttaaacaccctttgaatggtatatatttaatttcggcaaagcagctatcctggaacttataaagaaagacagtggttgctaggggccggagtgaaggggatatggaatgttgttatgtaatggggaccgcatttaagctttgcatgatgaaaaagagttatgggccaggcggaatggttcatgcctgtagtcccagcactttgggaggccaaggtgggcgaatcacttcaggccaggagttcgagaccagcctgagcatggtgaaaccccgtctctactaacaatacaaaaattagctgggcatggtggcacatgcctgtagtcctagctactcgggaggctgaggcacaaaatcgcttgaacccgggaggcggaggttgtagtgagctgagattatgccacagtactctaccctgggcaacagagagaaactccatctcacaaaaaaaaaaagttctggcgatgaataatggtgatagttgcacaacagggtaaatgtacttaacgtcactcaactgtccacttaaaaatgcctagatggtaaattttatgtgtggtgtacctcaatttaaaagaaaaaataattataaaataaaaaaagcataacaatccccaaaacctagagaagcatatatagaaatgtgtgatgacagctgcatgaaacatttagccatcagcccttttaactattaagtatgcctcagccccccaaactttttaaaaacctgtcaatggctgaaggcagttccattagagagaacttttgctcccactgtcttgtctaaataaagcaacagtccctaccattctctatcatgaagccaaatcaatttctcagaaggacaattcaataaatgagcttttctgcagtttgtccctttgcagtggcacacagggagctatgtgtccacaagaggagacgaactctccactgactgctttcaaaagctagttgggtggagaaaaagtcttgcaacatttcatgaccatttactggcttaacacctcaactgctcacagtggactcctgacctgacacaatgttgttcctcaaggtctctccaggatttaaattctgacatgctagaaaaagccatccgaagccactaaccttgcctccccttcttgaaccgggcaaggttagttagggacatcagattcatgatgggtcccttcgtcagaattcagaggccaagaaggcaggaaggagagaccacccaatggtgccctctcaacttgttaaccacaaatcaccttccattaaacaaacagcagcagacaggtaaagagagagggaattctgtgattcttcctttgccttctggagatgctataaatactgtatacagttcggtgaagggaataagcaaagttcttgccaacagacaaatataatcagcaaaaaaatgcattttgcataacagcccctttgagtgcagagataagatgaagctcaggacttcattatgtatttaaatagatccagcttcaactatccaatggcatggaggacacttggtgatttcagataatcaatggtttacgtaagtggcaggaaaagggaaattcattttaaacacgagaaatactagggaatatatgccaaatctaggaaactaaaatttgagataattcaagtttatagaagcacaagaataattgtaaagtaggtcaaacgctttcattttaaaagaaaaaaaaagaaagttaccattttttaagaggctagataggaataaagctccagtgtgaattctgaaaaggcttttttcttgttgattctatactcatcatattttgtttacataagacttatttaagctattatttttaatatctgtaaagagaacttaaggccaggcatggtggctcacgcctgtaatcccagcactttgggaggctgaggtgagatcacttgagatcaggagttcaagatcatcctgaccaacatggtgaaagtccatctctactaaaaatacaaaaattagccaggtgtggtggtgcatgcctgtaaactaagctacttgggaggctgaggcaggagaattgctcgaacctgggaggcagaggatgcagtgagccaagatggcgccactgcactccagcctgggcaacaagagcgagactccgtctcaaaaaaagacaactttaaatttgaggtttccctcccccactgaaaatggtgatataatggatccctctcaccctcacccacgccgggttcattctttggagaagaaaggaagctctggactccaggaagacagacacaaggaaaacagggaccgtgcgctgcaaagaggcgaacagatggcagcctgcctgaggaagggcagtggcaggattcatctctggcaaagctcagtcgcctccaagaaaagactcacaaataatcgtcaaccggagtctctccacaaggccgcttactgtctgtccatgctatgaaaggtcccagtacttctaatgtgcacagatgatataagcagctttttcatatctcacatgtaaatatgaccagtcaaggatcaccagacatttgctgaaagcccccagcatgaaaggcagagactaaagcacacaggagaaaatgtactaggagaaaggagaagccatgcctgaaacagagaaagcttccctaaaatctacacaacccttggagatgcaagggaatctaaaactataaacaagtgaacaaaaagtacaggttacaataaaaaggaacaatgagactgaaaagagagcaggagaggggaagggagggagggaaggaggaagggagagaggaggtggggaaggaaggaaggaaggaagggagggagggagggatgaagggaaggtgggagagaaagcttcttttaggaattaaaaaaaaataaccaaaattaaaatgtcaatagaaggaaatcactatgaaggatcagaacaccagcaaggtgcagtggcttaaacctgtaatctcagcacttcgggaggctgaggcaggtggatcacttgaccccaggagttcaagaccagcctaggcaacatggcaaaaccccgtctctacaaaaaccacaaaaattagcaaagcatggtggtgtgcacctgtcatcccagatattcgagaggctgaggtgggagaaccacctgagccttgggaggctgaggctgcaatcagccatgattataccactgcactccagcctgggcgacagagtgagaccctgtctccaaaaaaaaagagaagaaattgtgcttgctttggcagcatatatactaaaaaaggatcagaacaccagtgataaggaaatgatgctaaagagaaaaaaagaaaataaaacacaaacatgctaatcagaaatgggaacataatcagaaaataattaaaccaaggggaaatgatctccaagccaaaattccaaattactcaaatattatgcaagtaaaaggtagaatgaagacatttttaaatgtgcatcattttataagaagttactccaggttattttcatgaaaacgaagcagctggtaattctacagaggctgttgtacatgaggcccggagagcagccatatgggagcaggacaatgtgccaggggagggcaggcttcaaaggaaaacatcaatgatgaacaagctaacatgctggagatttagaaaatatcactgccacataaccaggaaaataagcaatatgagccttcctcccaaaaaaagggggcagtcattaactacagaaaaaaaaattaagaaattattacagaaaagaaataagatcacagtacactacttgactcagcagccaatactatttatatggtcataacaatgtaataacactgattagtgctttaatcctaaatgttcatatacctatatgggaagatgaggaaagaagaatttatagctaacacagctaaatgttcatctatcataatagaaagtcagtagtatctaaaatccattagaaacagcagtataaacatgttaatgagggcaaatacaagaaaacaaaaacatcagctaaagtagttttgtatcgttgcttctagggaataagcctcatgaggcgaagagggcaaaaggaggaaaataatttcactttaagccttttaatgttagctgaattcttttaaactatgctgatattgatttaatacaaatttaaactaatgtaagaaaaggaagaatacagttagtaacataatttgcatgatacataacagtatagaaattgtataggaagatctagctcaaccacaattatacctctgcagtgtggggaaacctctgaggcacccacaagaaggcataaaatctagctgatttccagccttgtatattcattttgcacttcaacatccacattctccattaatagtctcctaagaggtaggcaagtggggcccctgccagggctctgcacctcaggaggtcccatagtttggagggcttttcttgaaattttccaagtctccctctgtctcctggaaaggggaggtttcaggaggtttctccccttcagggagctctctcaccctgtaccagctattcagtgtcaaaaagatgcccgaagctcttgaacttgagtctgtggctagtgagtcgcacccaccagaccgtgtggtatttctttcaccagattgcttgagattgggccaccagaatggtgctgacagttgatccggagtgagccaaattctttatatagataaagcctccataaaaaaatatttgcctggggctccacatatcctagagttggcccttcacaactaatccatgccaaaatcaaaggtaaatatttctacagtggctggctaggggcagggatataatctacggtgtggggaaaacaggacttagctacagactaagtcaacacggaaaccaacaaagagaatgaagacctcgcactcagcttgtcatatcagtggataatgtgaagttaagaggaatataaacaccagggaagatcaaataaggatcccagaggatttcaacagtttattagaaggataaaagccacaaggataacatatcaaagaggtacatttaagttctgagttgggtttttgaaaaaaaaatctattaaaataagatggggaaggccttgttgggtaagaattgatgttgagggtttaagataccacgagctcagtctgagtcaacagtttgatgtggcttttaataaaaggaattgactctagaggaaacaaggacaacgggaacctcactgcagcctgcatggggcagaccacacagaggctcacacaggatgctgagcgcctgggcacgcttacaagtaagaacagggagaatggcttgggaaccttaggcagggttgcccaaagagacgtggcaggaggtaaatgaaagccgtttttaagtatttaaaaggtgatgagtaaggataagcagaagacttgcacaggactctgtgggtgaatatagaaacaaagagaaatggcaagactcaccagaaagaacatattatctcaacatgatgaagaactttctaggacttagggctgactaacaaaaccgatggttgaaagctgggagatctccaggaatgggagaggctgcccagtgggcaggctcacctgttggccagggtcttgcagggaccatacctcctttgagaggggcactgggtcaagatgccaaatccccattaaagtctcttctaccacaagtccacttgacacctccttatgaaagatgatttacaggtttttccctaacctggctgcccttgtccagggcatgtggccatgaccttcctcaagtctgacacacacagctagacatggcttccaaggtagttctcttgagcctgacgaaactcaagaccttagccttttcacagtgaagccacacttaatttttgtaaagatgcttatttaagaggagcccatggaactagtctttttttctttattactaaaatggtaactgttaagcatttgctatctatcagacacttaccatcattatcacacttaatcttcaactcaacttaatggcatatgagtcttttaatatgcatacaatacccttgcacaagtgactttctaaatgatgagaaaactttctatgggaagaaaaggcaatcaattcctagagataacattttctatacccctttagatatataactgcatatgattttctactctattgtctttcttatttgcctggtagctgtgttcccaaggcatttaacagacaaattaataactaatattaggatatgttaccataaaggtgggtgagctttttggaattgtatgtgacatcctaaggtaatgaatgaatgaaggcccaataggaaattgtactttgtaggtggtaggtactgtctctggcttcaagttgaaggaaagaacttaaattaaaatagtgcagacagcatagcacttcttccatatacatgactccaacattcctgctcattcccactctcccctggcctcacacatataaattccttttctacttttgttggtaacatgaatctcctttccatgggtgaatctgtgggtatttgagtaacagtgtcaaatcagcagcacacaggctctggaaactgtgtgcactgaattgagccctggggctggaataacctacacattacttccataatcatggctgattgcctgtgctttagcctcacccctacacaaacaggtttcattctgattcggctgctccagagttacatggatttataataagcagaaggcagagaatgccttcatggtatccaaacagcagtaatttcctccaaaagcttccttttgtgctctatccctcataaatggcataaagctttcaccatagcaagaagacacaaaggttttcaaaactaagatcctacgttgtcacatataaaaaagtttacctcatgtgatctattgggtatttacattctactagcaattttatggccatgaagttcctttcaaaaggaattcacatcagaaatgtgtaagttaaaaagaaaaccttctgattccacttgagggttaaaaaaaatttttaagggaacctttctgaaatccatctgagaatcatctaacctgtgtagtgaggcaagaataaccaaaatcaggtttcactttagaaatatttccaatgagtagcttaattgtaggaatgagaaaaagctagtcactttttactgtagccactgactcttgcccacgttcttcttagggtcaacagtaataggacaaatagtatactcagacaataaaaggctttggagaaacataggcttgatttgagttgagtttgggtccaattactagcttttgtaagcctcgacttcaacaaatggggtatacaacacacatcaatggattaaaatgtggatacataatccaactaactactgctctaagaattacatgtgactcacattaagatggtggtatacaataagggctaagtaaaacatagccaccgatctcacaataatgttactgttgctgtcaggtagttagacatttcctcatttgcaagatttccaattaacaaataaaaaccatgtcagatgcagaaaaacaattttttttttttttaagatagggtctcgctctgccacccaggctggaatgcaatggtgcaaccacggctcactgcagccttgacctccttggtgcaagtgatcctcccacctcagcctctcaactagctgggactacaggtacatgccatcgtgtccagctaattttttttatttttattttttggtagagacagggtctttccatgttgtctaggctggtcacaacctcctgggctcagtgatctgcctgccttggccccccaaagtgctgagattacaggcatgagccaccatgcccagccaaaacaattatttataacatatatacaagaaaattttcatgacattatagcatgtagatttaaaaaataagacactcaaagcattacccattaaggaaggcttaagaagtgagaatgggctacaattaagtttcactgcaacaaatgacaccattaagagagtaaaaagcaagccacagagtagaaaaagatacttgcaatgaatataatcaacagcgatgatatacaaaatacacaaagagctgccataaatcattaacaaagaaactctgatggaaaaaaaatggacaagagagtaaaataagcacttcacaaaagatgatattgaaatggtcattaagcgcatgaatatgtgctcaatttcatattaatatcttaaaaaggattttaaaaaatctcagtatcaagtttgcaaagatgaggaataactagaattctcctaggctgctaatgagagtataaattacattaatcattttgaaaactgtttggcatatcctgaatatgtgcctaacccatgaccctgcaatgccactcctaggtatatatgtttgtccaacagaaatgtggacaaacataacctgagaacaggtacaagagtgctcacaacaacattgcttgtgatccttaacacctgggaacaactcaaatgtacctatggaatggttgctatatgtcccagttggcctgggactgtcctcgcttatacctggtatactggcataactgttaatagcgtctactctcgaaagtgtcctggtgaatgccatcaacatcaatgggggttggggtggggtaggagggttaagaacttccaaagagccattccttcacaaaagcaacacgaacagtggtaaaaaatggtcaaaatcaactttttcacaattccagaaattaatctaagttctgcaacaatctaagctgcatttattaaagacaaatggctgaacttcagtaaaaacagcaagttttgtgatattttaaattgctctatttccatctttttctcctcatctatacaatcacatgaaaaccagctgtgtagcaccacaggagggaacaaccttcctcaagtctgacacatggaactaaacatggcattccaaggtagatctctacatcttccccaaaacacctttctcagagaaccatcactaagcgacctgtctagcaggtcccagaaaaacctcttcacgagcttgttgctatttgacctgactcagacctcattcatgcaaacactcttcactccagggggtgcttgtgaaaaacaattaatgacaattgtttagcactacagtcgcctgaagcagtgataacagtcgaacaaataagaagttgaccaagaaacttgaggaaaagttggggaatacgatttccacaaaaggctctgaaaagctatgacacagtccttggaatctggaaggtcactgatacggtttggctgtgtccccacctaatctcatcttcaattgtagtgcccataattcccacatgtcgtggaagggacccagtggtaggtaatcaaatcatgggtgcaggtctttccatgctgttctcgtgatagtaagtctcatgaaatctgatggttttataaaggggagttcccctgcacatgctctctcttgtctgctgccatgtaagaagactttgctcctcctttgccttctgccatgacggtgaggcctccccagccatgtggaactgtgagtccattaaacctcttttccttataaattacccagtctcgggtatgtctttattagcggctaagagagtcacaacacagtcttagtgaattgactaatacagtcacaaatatgtataaggctgtccacaagcccagatagtcccaagaagttcctaagctcaccctatgactgaccctacagctcggtgaaagcagagatgaaggctaaggcagagatgaagctagttgcctgagtgttgatcatgtgcttgaacttgcaaacttctgttcttaggaaagactaggaaacttattgcttctgtacttttaaggaaatctctctctaataattagctgactactaaactagctgagcagagacttcagtgggcacacataacaaagcctaaatatttcacagattttaagaaagtcactaaacaaagaagcactatcaccaccgataatcaacaacaatagcaaatcctggaggatgggaggtggatctgctttcagagttgccacatttatattattttaaatgtacaatttaaaccaaaaaagtatgagacatgcaaataaacaacaaacaacaataaagtatgggccaggaatggtgattcatgcctatcatcccagtgggttgggagaccaaaatgggaagactgcttgaagccaagagtttgagaccagcctgggcaacatagcaagattctgtctttaaaaaatatttttaaaaaatcagccaggtgtggtggtgtacacctgtagtcccagctacttgagaggctaaggtgggaagattgcttgagtccaggagttcaaggttacagtgagctatgattgcaccactgtactccagcctgggtaatagagcaagaccctatctctaaaacaattaaataaagtatggcccatatatagaaaaagaagtagtcaatagaaactgtctcagaaaagtcccatgttgagtgtactagacaaagatttcaagcaactattttgaacgtattcaaagaactaaaataaaccatgtctaaagaaataaagtatgaggctaatatcacattaaatagagaatatcaataaggaaatataacttttgtttgaaagaaccaggccaggcacagtggctcatgcctgtaatcccagcactttaggaggctgaggcaggaagatcacttgaggccaggggtttgagaccaccctgggcaataaagcaagacctccatctctacaaaaaaatagaaaaaattagctggctgtggtggtgcacacctgtagccccagctattcaggaggctgagctgggaggattgctcagcccaggaggctgaggctgcagtgagctgtgatcagtgcactactgaccctacagctcagtgaaagcagagatgaaggctaaggcagagatggaagctagttgcctgagcgttgatgataggcttgaacttgcaaacttctgttcttaggaaagactaggaaacttattgcttctgtacatttaaggaaatctctttctaataattacctgactactaaactagctgagcagagacctggcaatttatgagacatgcaaataaacaataaacaacaataaagtgggttgggagaccaaaacaggaggactgcttctattgacattctagtagtcaatagaacctgtctcagaaaagtcagatccaaaatcagtgcaccactgcactgcagcctgggggacagaacaagactctgtctcaaaaaaaaaaaaaaaaaaagaaaaaagaaaagaaaagaaaaaatgaccaggtgcagtggctcaggcctgtaatcccagcactttggaaggccaaggcaggtggattacctgaggtcaggagtttgagaccagcctgactaacatggagaaaccccacctctactagaaaaaaaaatacaaaattagctgggcttggtggcacatgcctgtaatcccagctgcttgggaggctgaggcaggagaattgcttgaacgtgggaggcagaggttgtggtgagctgagattgtgccattgcactccagcctgggcaacaaaagcaaaacttcatctcaaaaaaaaaaaaaaaaaatatatatatatatatgtatatttcatatatatgtatattttatatatatataaatataaaaaaataaaaataaccagaagagctcaacagcagatttgagttggaagaaaaaagaatcagtgaacttatgacagatcaagtgagattaaggaatagaatgaaaaaaaaatgaacagagtctcagaggcttatgggacttcatcaagcatactaatgtaaacacaacaggagtcaccaaaggagtggagcaagataaatgagcaggaagactatttgaagaaataatagctaaaaactttccaaatgtgatttaaatacacaaacacatgcacacaaatctacagatccaaaagacactaccccataaatatatacacattgtattttgtggctactagtacccacaacaatttttaaaatttaaaaatattaaaagatacatatctgaaagacaataaattccaggtaaagtaaactcaaagagaatgatacctagacacataatactcaaactgtttaacgacaaagtcacgatcttcaaatcagcaagggagcctcataggataaacagctgatttttcatcaaacaccatgaaggccagaaagcagtgggattttcaaagcactgaaataagatggtcaattaagaattctatatccagcaaaactatccttcaaaaatgaaagggaaattaagtcattcccagataaataaaagtgtcctggcttggatgataaaagacatactcaattcaactagtaggctgcatttgtgagtggggtggggttggggaaggtggcttaggtgcctgaaacttctatttcttgtcctggttggtggttgcataattactttatgatagctcactgagcagtacacttatgttgtgtgcactcttctttctgtgttttacatcacagatttttaaaaaagaaaacacagatgctttgtctttatataatcaaaattagcactttatatttcttactttaattgtccaaatagaaacagcttctgaagccaaagccagaaacttggtgaaataaatgatttctttcctctatacctttgttctagccccctccttgcatgttatattcttacggtccttgtcacgccatttatacctgctcttcctttaatagtcattggtaggctttaccacattataaagatttgctatgtctgtcccctccgttatatgtgaacacttttaagaagacgaactgtcagctgggcgcagtggcttacacctgtaatcccagcactttggtaggccgaggtgggtggatgacctgagatcaggagttcgagaccagcctgaccaatatggtgaaaccccgtatctactgaaaatacaaaaattagccaggcgtggcagcaggtgcctatagtcccagctactcaagaggctgagacaggagaattgcttgaacctgggaggcagagattgcagggagctgagatcgtgccactgcacttccagcatgggtgacaaagcaaggcttcatctcaaaaaaagagaggaactgtcaaaatcttcttagtattctcaatagcactatgcagagcacataggaagcacagaataaaggtttgagaaaataattcttcaatggaatcaataaagaaagccttcctacataacaacacaaaaaagttcttgcagagtatattacaactattccaaactcaaaagattccctatcagaaaaatgttaatcctgaagcagttagcagagaagtattttttttaaaaaatgttgaaattcaaggatgctgagtagaaagttctgatcagatgaggaagagaaactgtttaggtgatgccagtcatttctgagatgtcattattttactttatgattaatatgagaaaggaacatattataaataaaactttttgacagctcaaatcatgtctaaaagaagaaattcacgatccctttcttaaatgcaacagaaatggtactgagaccacacaaagatatccttcaactcatgacaaacagagcaagtttctcacatccaactcatagccctccttagccttcacttggaaaacttctgaatgtacctactcctggaatttaatatagatgtttattttgtcattcactgtttttgtttttataatgagcaacagattaatctcaccactaaaaaaaaaaaaaaaaaaaaaaaaagcagtggagggagactgggtgcctaggcaagaaaagaaggtagccagttcagaggtttgaaatgccctgcaaaggaagtgcccaacaaacctgaaaaaggaaggcatcacccagggaattgctgaggcagaagacaaagtccttcttggggtgctcaggcaccgcctgcacaatgctgttctccacccagacggcgtgtttggggatgctgttgtggtctatcccagacctgccgtcgctctcgtagaaaaatagcgtgcatcctgaggaaacagaacaggggtgtgcatgagtattcagtgcttgggaaacaaaagaacccacagttgaacctaacatgtgcaccctgtcagaggctgaaaattaaagcacgtggaacccaggaagtaaagagaatggagccaggcttggactcaagtcttggatgggcctaaagaaggacaaagatcttaaattgtagcttctcagcctgcccgggtttccttcctgcatgccctcaagttctctcaaacccttcctttgggttttagaatgattcattacaggtctcctcacagacatagggtcttgtgactcctctgtcccgaggcagaggtcctccaggccagaactttgcctggcactatgtgaggatcagaagtcactaccgtccgattgaagcccattcaaatatgtctcgtatgatatgcaaccagaaaaatctagaaaatgtatttagttccagaccatgcccttggataaaacaatatataataccagcgttaagtactttaaggataagaaaaacaatgatacatttttggtctaacatcccatctataaactttttttttttctagaagccaaccatgcccttgttcctactgaaagaggaaatctatggcacacatacaaaggcctgggagaagccggagtcctggtccatgcataattgcactgtgaaactaacaagatagtagcaacagaatattttatagacttgtggcaagatggcttccatagactccttccattatcatctaaacttgaggctcactttaatagcaattatgagctgaacatttactccaaactaactgaaatcaatttcaggggaagccagggtataactttatgactcttcctcaacttcaacataagctgtccgtccattttcaccattttccttaccacaaacaagtgccacacttcctgtgaactgcacaacccttgaaagttcaatctattcggctacaatgggaatctgtcaagcaaatttgcttatatgcgattagtagtgtagaatgatgcagatcaatggaaaggtcacactggttcaagggcaacttttcctagcctataatatttcacattaccacagaatagctgttgaactctacgtccctccaaacagatgaatgtagcatattgatatgccctgcccacttatttcacattttttttctcttggtacagtttgaccatgggctctgcttacaagtccttattgcacggtgctgctgagcatcatgatttcatacttgtggtccttgtctccataatttaggagtctcaattattccttctacccattcaagttacagttgcttcttttttcaaaggtaaagccctatgctaatgcttttttgaaagataaagtttgccaggcacagtggcttatgcctgtaatcgcagcactttgggaggacaaggtagaaggattacctgagcccaggagttcaacaccagtgtgggcaatatagcgaggcctcgtctctactaaaaataaaaaaaatcagccagacatgcctgcggttccagcgactcaggtggctgagctgggaggattgtttgagcccaggaggttgaagctgcagtgagccatgatcatgccactgcactccagcctgggcaacagagcaagaccctgtcacaaaaaaataaaaatgaaagataaagttttatattgcttattgttaaaaaattttagtggagttctgcagggttatttttattttttattactattatttttgtagatatggggtcccactgttgctcaggctggagtacagtggcacaatcatagctcactgcagccttgaactcctgggctcaagtgaacctcctatctcagcctcccaaatagctggaactacaggcatatacaaccatacctggctaatttgtgtatttttttgtaaagacaaggtctcactatgttacccaggttggtctcaaattcctggcctcaagtgatcctcctgcctcagcctcctatagtgctgggattacaggagtgaggcaccacaccaagctaatttcttttagtttggggtttaaaagttgcatggtacaatttaaatacatacctgtagagtagtctgccccaactctatttttctcaaatcccaaagattttgaggatctcaaggcttttcaggaacacttgtatgaaaaagcagaataatctgtacctcctatttccatgccttaggctagcacagattagagagacaaagaaataacaaaaatgggagggggaaaccgttttcctctaagtcagaggttcttatgatggggcaaacttggcaatgtctggtgacctttctggttgtcacaacttgggggaaggtgctattggcatctagaggacagagcctaaagaagctgttaagcatccacaatgcccaagacagccctcacaacaaataattatccagaaaatgtcaacagtgtcactgttgagaaaccctgctctaaatagtttttacgactaattcaacactaatgaaaagtagattcctaacataaaaggagcaacacacgttagcatagcttaagaagagagaaagaagcctgtggataatgaattaggggacactcaccaatcctaacacacgcacctagtgaatgttgtatggtcccatcaggtaactgtttgtataatttttcaactttgatttagaatcatccacaacaaagcaccaccaaaagtgattaaaatcagcttttactcatgatcaactcgttccaactttaagatgaacgcgaagcagcaaatctgagaaccacgttctccctggtgaaagtctgtttaccttcatcttccctggaacataatctgtacgttcttccgttgtccatggaaacactccagagactaattccaaatgaaatctttttttaaaaaaatcaattactttgcctaatgggaaagaatctttagggaaaaaaaatctctatcccacagttccaacatgttctgctttttatttcccaatattcaagcattgctaagaaaaagtcagctgcaagtcttgcttttgagcagcaaggacaaagccctgaggatgtcaacaaatcctgggaacccatcaggatgaagcaaagaactcggtggctccatgttctgggcctgaattccaacaggctgtgtcactcagctctgcgtcaccaagaaagtaaagactcccttccctaaagggcctgtgggctgtgctcctggacacctgcaccctgacttcctgtgtcatttactctctgagggaatggcagaaacaaaataaacccctctgatatgtcccaagtaaaaaaaagccaactaatcatttttattttatgccactaacattgctgctctcaaactgagagtgagaatcccctgggaagcttgtttaaatcacaaagtcagggtctgctgaaggctgaattgtgtcctccaaacatcctaaatccagttagctcagaatatgatcatctttggaaatagggcctttaaagaggtaattacgataatatgaggtcacgtgggtggtccctgatccaatataaatggtgccattataagaaggaatttgaacatagacaagtaaagggaagaccatgtgaagacatcggaagaagacagccatctccaagtcaaggagagcagtctcagaagaaaccaaccctgccaacaccttgatcttggatttccagcctccaggactgtgagatgatacatttctgttatttccaccatccagtctgtggtgctttgctatggcagccccagcaaactcatccagggcctacctccaaatcttgtgattcagcaggtgtggggtacaacccagaaagaccctcaagaggctgtgatgcaggtgatcttcggatcaagctattaagaacttggcactaattaataaaatgaatgctaagatgggctgctaaggataagaggctgcagcgtccagaggtgtgcccatctaggggagaagcgggaagtggaagaggaagaagcctttcccctcatctcctctcactcccccagagcagagcagctggtgtgatccaggcccctcagacataaccctgtaacacctccaagttaagccaaggcacgtcacacatgagaaagaacactgcagttctccaaaatgcttccacacgatgcacatctatgtctcataggcaagaccactacagcaaaaaatcatcaaaagataatgttctaggaggccgggcaccaatgcaactgtaaacccaaggccaaagcaggaggatcgcttgaggccaaaagttggagatgagcctgggcaacatagtaagaccctgtctcaacaaaaaataaaaacattagccaggcatggtggcacatgcctgtagtcccagctacttgggaggctgaagcaggaggatcacttgagcccaggaatttgtggctgcagtgagctgtaactgtgccactgcattccagcctggaagacagagtgagaccctgtctcaaacagaaaaaaaaaaaaaaaaaaaagaaaaagataatgctgtaggaatagctgagcaacaaaacttcagaaggagccagggcctctgagtgacttcatagaaaagagttatcacacaagccttaaatcatctatttttgataggtgggagggaaataaagttctgtcttgcttatggcattgggattggcattgctggtctctggcacatgcagcaaaacctatatcctgaccaataccctcccttcctgtgtcatcaggcatctgagcaacagctggcaccaagaataatggggccaacgcaagtcctacttgtgcaagggttgacctgcacctgcacatcaccgcataggcatttgtgttcacctcactgagcagagctctaggctgctccatgtctctaggattgcatgttcccaaaccaaccacagtctgtgaaatccagtatcgaacggtctagtttgatactgataagcccaggcttcttcctcttgtgcccttccatcaatcctgttgacctatctaacctagcctgccatgtattaaccctgtttcaagtctagcttgggaagaaaagtctgtgtgtttgagaagtgtttttccttttaaaatatagagctcataaatatattacattttctaggctaccaggatgtatgcagtacgtgcaacaatacgtacatgtacttcacgaaaatgtgcaaaatgacaacaaataccaacaaatacaagcatggttatataaacagaaaataaagtgatctacacatgcatgtctgtatctatatatacacagtcaaaaacacaaagtttgactattaaatagtgactggctttttcataaacatgatggtctatacaatccattaatatcaggttgaatcctatgaaattaacattattctaccaattttttcctttaaacatggcaatttcatagaattcaagctaataaatttccctccaaaatagtcactttgaaagacaaaaagctggatgagtccaaaaagatttggtttttttggaactcatcctttgaaactgtcatcaaaccagttgcatacatgccaaaactagacatgagatgctcctctagcgttaactgtgaaaagagaaaatcaaacatcatttgcaggggtggggatgggagagttactaattagggggcataaagtttcacttaagtcacatgaataggttctagcttatttatttgtttgtttgtttattatgagctggtgtcttgctatgttgcccaggctggtcttgaactcctgggctcaagtgaacctcctgcctcccaaagtgctgggattacaggtgtgagctactatgcccagcccagatgactagattctagaaatctgccttacaacattgcacttgtagtcgataatgccatattgcacattttaaaatgtaagagggtagatttcatgcgaagtgctcttactatgataaatgttttaaattagtatgattttcaaattctgtataacaacaacaacaacaaacccacccatcccgtgagtatgtgcacaacggggcacctctattggtgcatttggcacatagccggggccctcccgctctcacctttcagggacacccagtagtgcttccacttcctccgggtggctgactccaccttcttgttcttcttgtgcaccaggaagttcttgacggccagggcgccggccttgcgcaccgtgccctgtgcggcggtcagcaggatgtccgactggcccggagagctcagggtgccgctgctctgctcatcgctgtgcgccgagccggcctcctccaggctctcgctgttggtggtgctcatctccagctcccgccggaagttctcgtacaccccctgacgagccgcatccccggtggagctgctgccgctgtcgctgcccacaaaggcccggcctgtggtgggtgagtagctggagttggtggcattagatcgcctggacaggaggtccgtgtcggtagtggccccttcaatcccactgtctgcaaactcactgccctcgcctgcattaacatccttgggagcagaaagagagagcaaagaagacaagcgtcacgtggagaaggaacccagggtcacgtggagaagagccctgggtccagccagggctctgtagcagcgggatacgcataaggcacagccactcctgacggctcctggaccaggtcctgctcaaccctggacccgcacagacccagcagagctgctcaggaaaccttcagccgccctccgtgagagcacacgatttggaatgttcaagaaatataaaagaaataaggagcacttcaaagagcttattatttctctaagataattaacgaattggcaaattcgcgattgagattctaccgctgccatgctgagaacccagcatcctcagcctcatcagcttatcctgaactccaggaaattctgcaggcagatgagttaattgttccagacgtagggggtgacaatgaataactaggtctttatagctgatatctttaaaaataaataaataaaaggcatgcttaggagtctcttttataatggagtgactgaaaagatagctagtgcaccgcctcacccactcacccagcacggctccgtgttccaggagcaggcaagaatcctcatcctctaatcagattcgcttcttgaaaacaagcagcctctcactctgcattgtgctaaataagtctgtggggcctacagctccattgagctctccaattaccttgccctttcaaagctgggatgctaggagccttgggcaggctacttgctgccccagggccaaatgacagctcggggcaactgccaagatactgagggtatcagttcccagtttaaaaacattgggaacttccaaagctgcttctgctctgaagctgaacatttccgggacagacaggtctgttctgaaatcagtatcttaattgctctaaagagctacaggcatttccataaacaataattaaataatggtagtcatcaaggaaggatactcactgcagtattggacagacagctcaaagtcttatgcataagaaaggagcctaattgttctccaaggaagagaacgggaggctgagtctaatatagaagatgccaaagtaatacacagtttggcagtttcaccaatttgggggcctttagtctcacaaatggctcattctggttcaaacacgtaaaaactaaccagatattctgaattaccatacaaatgaatgctctgggctcctatctttgctgagaggcaatgggggcagtatgagccatgccacaaactaatactggcctacacaaggccccagacagacactgtgcccatatctccacgaacttcacttagttctaagaattgctcaaagttcaccttcatcatgaagaaatactaaataagcaactaaaagagatgtatagcaagacatggaaaaaagagggtggtgggagtagaatggcagcaggagattgctgggtgagcttctagggatcaactccattataaatggagcttagacccctgggagttagagggacttaagggaaagaaagaaaccacgaatgcagctcagatgcagacccctataactgctggttcccacagctttgctatctgctatcctgcttattaacatccacgggtggtcatgaaagacctagagccaattggtaaaaatcctctacacaaacaggaaaacactgttatcaacccacatttctccttggcagggacattgaccatatgcttccctcttgatacaagacaaaagaaaatttgacaattgttgattattcaggataaccaatgagttacacaagatgagtctgtgaattttccaaacttttggattcattttcatgtctcagtccttctgggaagaaggtttggtatgcgtgaaaacatcagctattaagctctctctaaaatgcaaagaggtgaaatgcttctctgcaagacagggaaatttagctacacaggtaacatccctattccataagagagactttggtacaaaggagaaaaaatgatcccaggcatcttgtaattcccagagctccagaagaggaagggacttggcaaagctatctcattgattgacagcctgcggcttagaaaatcacaagtctggttggtggcagatgggaagttgaaacctatccttccaagtacactttccactattatatggtgacctcatgactcagctgcaggtagcacctgaccagattctgtctaaatattcagtctcagcagggcatggtggctcatgcctataatccctgcactttgggaggctgaagcgggtggatcacctgaggtcaagagtttgagaccagcctgggcaacaaggtgaaaccccatctctattaaaactacaaaaaaatcagccacacatggtggtgcacacctgtagtcccagctactcgggaggttgaggcaggtgggaggatcacttgagtccaggaagtggaggttgcagtgagccaagactgcaccactgcactccagcctgggcaacagagagagagagaccctgtctcaaaacaaaacaaacaaacaaatcaatcccatgccttcccccttttcttaccaacaatggctcttccagattttttcagcaaaagctgagtgactgtgacctgcctggcaaaaagctaaaacctgcaagtgcaagaaaggggaaggaggatgggaagagagaataaggaaaagcgaggcagaaacccgaaagaccaactctcaagggcgtgtctcataagagttcactacattgccaacaccatccatccctttacagaaggccctcacatctgtctctatttaaactaagagtaaggcctcaatggacactcacctctgtataagacctgaacatctgctcatgccaactgatgctgtagctttgccatgaccagactgtgtgtgttcaactctgggacaaccactaaaccaagcaaggaagtgattactccaggtaaaagacctgcgggccccaggtgagcttgcatgctttggaagcaaacagctccgtgtcatcaacggggaatgctcttgtcatctgtgatccaagacaactccaccttgtctccttaagtggttattcaggctcagtggtacacatgcccccactgatatgtgacccagcccattgagaaacggatgcaggttgcccagccccagcccttattcagtcatgaaacttgggatgtcccaaattcccagaagtccattctccagcattgctggaaagggtgatgacccagccagaggtgctactcaacaccgctctttctttccttcattgtgttgcaaacttacttagtggtcatctttcagaggggctcctgctactacccacctgagaatcctgatcctccccctatcccagaagcacctgtaaacctccccagtcttcccagcagtgaggaatacagaagactgacaccacggaatagtcccaggggagcctcagcagtttttgtagcaactgcaaggtaggttacctcttagagtcaaatactaaattttaatcaaaaaaggcagaggacatcaagggagatggtaagatcctggctagacagagaaataattctaaacatggttcatgatctagctgagacttccagaaaacagctcaaaataaactctccatgttagaaccactccgttgaagagatttccgatcatgaacaacattcacagggccgagaggctcttcaatcctgttctcccaggacaaattctctgaagccagattttcagggcactcaccagttgccattccactggcagcttccccaaaaaatgaatgtatgcacaagtggccagctgtagcctaatacatacaacagctgtgggcaagagttttcttagcatttgagctgggcaacaaatgcttaaatgagctcccaggctaaaatgagggaggcaagaggcaaattcaaagcctgttttcactgccttgaaaactggagggtcacgcagcatgaatgtagactaatgacacattgtggtaaggctccagttgttttgacaggagacttcaaatactaccaaagggagaggttttctgtgctaatgatgtgcgaacacaattttgaaaatgcaattagccagaaagtgcaaaggctctgggacaattccaggaccagtagaatcaattggccacttgtagttaagttataagtcgaatgcaattagatactgtttcctttgtcacttgaatttccctgatagatccagcttgaatacacctgtgttaagatgctaactacaatgcagaattcactgaattccagggggtaaagaaatgtggacctacagaaaccctgaattagaactgtttctggcttgttaaattctaacatgtccttcctctgatttatcatcttcttcctaaccccaaaatattaagtacccctcactacacacacacacacacacacacacacacacacacacacacgtatattatctttggctctcagtattatctccttggtattctcagtatactctcctttgataatctcagtacagcaagtatcaattctaggtaaatgactctgaaccaatccatgcctcaatttcttgatatgtataatggggagagcaacacatctactttgtaagacactgtataagacactgtgagattgagttaacccaggaaaagtgtcttaaactgagcccagcacatagtacctgctcaaaaatgttaactataattacggtcatctctaccttcagccctacttacatcttggcccaaggagagaaggcattgcctgaactcagttgctaacttcctgcaccaacatggaagaaaggtctctgagaaacctgggaaaaacacaggcataccaaggctggtgccagcctaatactaattaggcttgttaattgttctcacgttcacaaaacagcacactaaactaggaaaatggtgacgttctctacattataaattagtaactactggtcactattatgaaatactaataattgccatccctgatttgccagaataggaaatcaactctattttccctccccttcctttcttagggcaaaatctctatgcctttctttttatgtttccaacaacccattccttttcttctaacgatttccaatgggagtgactcacaatttcagctacaagcattggaaccaaaattcctactgttactaaaaagggattccaaagtaagttggcaaaagcttgaaatgttccttcaggtaactcctgattggagaagctttatgtctaagttaaatgaatcattgcctctcctttcatctgcttttctatgtatgtgcttataccttacagtcatccctcccctccctcctcactatccataatatatcagagactcagttttttctcttcccctccgagtgccacatcactggttgagcaataagctctctcttctaacccatcttccttccatcaatccatccggcacaccactgccaggtaaatgttccaggagcaatgtggaggactcctcagactgctgttcaagaccctcccccggtgtcccgcgttaaaacttgagcttcgatgtccccacccactagtgaaattgaagaactcattccagggcatactcccaacctttctcactcccaagaatactcacgtccccccttttactacaaccagaaggcttctctgtgcttcctccaactaccatgccaacctctccacagcatctcctctcccacctccaccccaccccagccaccctgagctcctcctccttgctcgaatgtgctgggcaccctcccacattgcaactcaggagccagctccctcctcccctcctctccttccaagtccctatccaggtctgccctcaccctgaccaccctgtcagaaattgccccccacatcccccacaccccatcttcctcaacatgccctgtctttcttccacagcacatcgcttccttattatgctaactgttttctgccacacacacacccacttcaccccaacgagctccacgagcttgtggatctttccttgttgacgcatcccaagtgccaagaataaagcctggcatggggaaggcacttcaaaaataattgctgaatgaactcactgctgctcattttccaccacaatctcaaaacaaggaaaacagtttctcatggaatgcactgcagctggagttaaaggttttgtcatttctaaactcagctcatgctcaactaaagttgaggtgacaaatgagtcctagctataaagcttacatttataggctttaagcagcctagttggattatgtcttgtgtggatgcaatcggagttcacttaaatttttgttctttaactcttttaaaaaattgaggaagtaagaaagatatattaggctggacgcagtggctcatgcctgtaatcccagcactttgggaggccaaggcgggtggatcacgaagtcaagagatctagaccatcctggccaacacagtgaaaccccgtctctactaaaaatacaaatattaatgcacctgtagtcccagctactccggaggctgaggcaggagaatcacttgaacccgggaggcggaggttgcagtgagctgagattgcaccactgcactccagcctggcgacagagtgagactccgtctcaaaaaaaaaaaaaaaaccagaaagatatattgaactatcttatggcccaagctagatactcggtcaactggtggtccaaagccaactgggcccaaatgacaatgtgacaggctggtcaggtgtttcctaagttctccattgggatccatggagaccctgtcaggcctttagggcaggctggctttatggccacatccaacagtcacacatttacagttatgctgtaaaaaaacaatgattacacattgttatgacacaatttgagtcaaggggctcaactttcctctattcttatactaggaatgtgatcttctttttttttttcctttttcttttttgagacagggtctcattctgtcatgcaggctggtggaatacagtgacatgatcatagcttgctgcagcctcaacctcccaggctgaagcatcctctcacctcagcccactacgaaactgagactacaggcacacaccaccacacctggctaatttttttgaaatttggtagagacaaggtctcactatgttggccgggctggtcttgaactcctgagctcaagcgatcctcccacctcggcctcccaaaatgctgggattataggcatgagccaatgcacccgacctaagaatgtgatcctcaaaagctgaactggtgggcatagtggtccatgcctgtagtcccagctacccaagaggctgaggcaggaggatcacttgagcccaggagttcaaggccgcagtgcactatgataatatctgtaaatagccactgcactccagcctgggaaacacagcaagacctgtctaaaaaaataaaataataataataataataataataatcctgaatgttcccaacctgtattagcataaatgaccagctctcaaagtatggactagggttccctaaaatacttccagggagtcagtgaggctcctccttttccaactaccctgtgcaagtccaggttctgctcatagggtccaaccaaacagtatattgcaagagagtgaatgcaaaagtaggtatgagacgctagtgtcttctgttaagctagaaatcatagagatctgcaaaaatggaaaacaatgcctctgtcccacatcttttattttagagaataaaatattgtattactttagagatagggttctcattctgtcacccaggctggagtgcagtggtgtgatctagctcatgaaagcctcaaattcctaggttgaagccatcttcccatctcagtcttgcaagtagctgggacaacaggtactcaccatggccagctaatttttcctttttttttttttttagaggcgaggtctcactatgtttcctaggctggtcaaaaaatatatttttaatataaataaataaataaatatttttatataaatatatattaataaaatatatatatacacatatatacttttttttttttgagacggagtctcactctgtcgcccaggctggaatgcagtggtgcaatctcggctcactgcaacctccacctcctgggttcaaatgattctggtgcctcagcctctcgagtagttgggattacaggcacccgccaccacgcctggctaatttttgtatttttagtagagacgggggtttcaccatgtaggcaaggctggtctcgaactcctgacctgaaatgacctgcccacctcggcctcctgaattactttttaagagtataaaaaggtctaagaatggctaacataagctatctctcaactacctacccaccttccaacttcccaaaaacagatcttggcaaagaagatatatattcttgttgaaaatgcatgggtttgtttgcaaaataaatatctcattgcttaacttacgtgccagaaaaagaaagataaagagaaaagaaaaaaaaaaaagcatcaaacagaagatagaggagaacagaaaaaaaaaagggtgttttaaaaatcgattttacatgaaaaaatttgttttataaaaacctgaggttcttaaccagaaagaagcctctagatggactttaggggacctatggatcccttgaaatgatatgcagaagggtggtccctgtctttatctaaggaaaacgtccacatttttcatctgattctcaagagtctgtgaccaaaggtcaagaatcatatggttgttgatgtgcattttcagcccaggaaacaaacttatctctgagtcattgaagctcagttgcaaaataaaacaaaactttaaacatcaagacaatttttctaggaactcaagctcctcctctgacaatgctgcactctttaccttgttattaatgaaatcatcaacgcgactacttgcttatcaaagaaagcagccgtgagggatggctctgctacagttatcctggccatctctctccgtaatcagtgttttaggtgacaaaagtgggcagtaataattttcttttcagccaagtcctttttttttttttttgtatctgtaccaaaattgagggttttgatcttaaaatctgaggatattgagctgaaaccttttcaagcacggggaggtagtcagtgtgggtgtgtgctttggaagaaaaggccctccttgattagcaagtcagaaagaagacttggatttttggccgggtgcggtggctcacgcctgtaatcctagcattttgggaggctgaggcgggaagatcaccggagatcaggaattcaagaccagcctggccaacatggtgaaaccctgtttctactaaaaatacaaaaaattagccaggcgccgtggtgcatgcctgtaattccagctactcaggaggctgaggcatgagaatcgcttgaacctgggaggcagaggttgcagtgagctgagaccgtgccactgcactccatcctgggcaacagagtgagactccgtctcaaaaaaaagaatacctgggttttcatccagttgtgacacctcatctcctaatctctttattttctagggatgctgctgtgtctgaaactggccagtgaaacccacaaatctattcaccagcaccacacctggctagggacgctccgagagccgggctccttgctggtctcctgaggctgaggttcccagagacatgctcagtacaacctggccgtgttccttcatctcccaagtggatgaatgaagctctcctcacaagcatgcacaacggctccacgccaaagcttcccacagaacacagaacctggctataaggctccatcaaacggcaggtttctctctctctccaactcacccactgaaagtttcagagacacgggagagcagaaccctagaacaatgaggcaatcttcaacatcacaactaacaactcctatttattaagcatttgtatgtgtaaaactgtgccatgagttttccattcattcccttgcagaatctccagcctcatttaagaggcactgagatccatggaagtcaaataaccaagaggtaacaacctcaaagttgcaagctcagatatgctgctaacttccttgtctgacactaggcagccccctcctctgtctgtaaccaaagaaattcataaagttcaggcccaaagacgaactagccatcaactaaatctaaggagtaacctattaagtacttttacagaaaccaacagaaataaattctgcttcaaatagcatgaggctttactcatactgactcccaagacaaacttttctgcacagcgcacatgtggatgcacaacaaacatgctcataaaatacacgaattaaaccaaaaattgccagcagaccctgtagcacatatgtgccaccattcaagacttaaatgtgaactcctgtgacttcacattacaataatccatccaactactgaaaaaatccaaaaacaggaaaaagggccaaaaacccatttttgatcattttcaaatcaaatgaagttgttcacattatttcagataaaatgtgttttcttccaggcttagaggtcatgctcttgggtcaaatgtctgccaggaactcttttctggggagtaaaattgctgacaggatgatcacagattcaactacatcatcagggcagccaaggagactttaatatctatgattcaagctcactggagaggtcccctgggtcaaaaacttttaccaaaaaaaaagaaaaaaatttttttttaaaaaagcattcttttcaaggaagcttccacacccactgcctcttaaaatacactgtttggaacatagtgggctctcaagaaatagcgttggatgaacacgccaaacttagactaggaaatgtgggcgggtggatagtgttgtgcataattccggggtttgtttcaagtcattaaagatcctcactcaacatataaagtcaatacaaaaataatacttccgtgcattttatacgctccacaagaggtttccatgcatggtatcctatttggttctcccaatggccctgtgggaggctggtgtcactcagactggacagcaacagatcctggggcacagaagatggagtgactggcccaaggtcaccactgggtaagcacacatgccaggatgcaaatgcacttcttaggattcctggccaatggcacttcccattacattaagctgcctaagcagtgattttatgagacaccacctttagatgatctcacttccatatattcacaattttagaaggtgacaagccaaagaatagaaatttcgtataataatgacacatgagagctttcagtggtaccagacctagaggggagaactgtcctttgctttgcccattttctgggggtagccgtaactcaaaggctcaaatccccatcagccatcgagtataggggagagccatccctagtgtcagaaccacagagagccaaaatacaacagggcacccttctcaaatcttacatagcatatgcactaactgagcactgttcaggtagaaatgaaagtccaaggtgatgttctgtttttaacagtctgcgtcactgtatccttctctaagctccgaaggccccatagatcatctctttgaatcagccttgcagtgccaatctgataatgccttcaagacagcccttcaatccctttcaggtgactctttaataggtcacatatctccatgatctgtccaattgacagtgcagaagtagccctcgcagggtagacagaggggctgcaggtgggttatctggtcatttgtgtcattacaatctcaattcagaagagatgggtttaaaattcagggagtgcatctggaggcaagcttcaggcttacgttctcagaccacagatgcagccttggtagcaacttggtttctaggacacaagtgtttttttttctttccttagagtcaaggggtacacgtgcatgtttgttacatggatatattatgcaatactgagatttgggcttctattgaacccatcacccaaacaatgaacacagtacccaataattcgtttttcaactcttgctcccctccctcccagcttttggagtccccagtgtctactgtttccacctttatgaggtactcaagatattgatccaaacaactaccccgagtcctcaacccatatgcctccactaacaatgatgaaaattacaacagctaacaaagttgcccttactggctgcttcctaagaaccaggcactatgcttcacatattatttcattctactttctcaaaaaaccttattacccccatttgacagatgaagaaattaaggctacaagaatgtgaacaacttacccaaagtcactcaggtaagaagacgtggagccaaaatatccggcttggacaccatcagcaaaacctgtcctcaggcaggaacacagacagtctaatgccgattttctttttctcggcttcccctacatcctccatcctatgcccattatatttagaccccctttccagcagaacatacccttgaaatgcccatttgacttgcactggagcaaggctggaaggtgcagtaccacctcctactgggcaatcagagtgctgactgcagggaagtctgctggtcaaccttgaggctgctccgccattcaaggcaaacggacccagtctggaattttaacctgaagcaccatctacaaaccacctccacatcctcagcaaaagccaagactccctgaactctgcctcagagaacagaagtaccagaaaaggcccaatgcatgcaggattactccacatttctttctttctttcttttattgacacagagtctcactatgttgcccaggtgggacttaaactcctaggctcaaagcatccccctgcgtcagccaccaagccggctcaactgcccaacattttattatcctaatcttaattatcattgccagctaaggtaatggtgcctccattcactaggaaaacactttcaaaatcttttttttttttttttttttttgagatggagtctcgcttttgttgcccaggctggagcgaagtctcttagtttcctccccacggtttcgtgcactagaccccgaagcaggcaagctgagcatctttatccccatttttcagaggaatgactagaagtcagggtttgcccaaggtcaaacaactagctggttgcaaagtaagaattggaagccacccatgttattccttccgctacacctccctccagagacagggctggccagcatcgcacggaacaggaaattgaaatggctcccggtaaggcagcgagcctgccaaccaccgagagaagctgacaagtgacccaaacccgcccagaatttaaaatgcctcctcagaggagttgccgactaacctcctcccacctgctgcagtgaagaaataagttccaagagtctgcaacccaccatgcctgtttttccacgggaaggaccaagttagaaaggaagcttgaataagtgggatgctgttgaagaactaagatgtagaagcagtttcccaatatgaacttactagcttttttcccactcctatcacatcgccactccccccacacacttcccttaatccccaccccttaaccacagaactctaagaggggcaaagcagaagagagagaaatcctcccaaaacagcaccagctgcagcaactaccaggcaaacagggtaaaacccgattaaaagatggaaatcttctaagagcaaagtcatgcacttaaagagtcatgcaccattcccaaaatattgaaacaaatttcaatcactttacctgagttgttttagctcttctgccttgcatgctgttgctatggctaatttgtgggttggtggcaccttcagagagacagtgagatttcctacagggaagtgtgttataattactgtacggaggagtctcttcagcagcagctggtggcatcttatggtttgcaagattgggaatatcagacaccaaattccgacagtagcctgcaaatttgctccccggccccccgtttgctgtcactccagagtttttctgagcatacaagtcacccaaggaattggctctctgacaggtgctgagctgccgcggactcgcccgcgtttccatcccccgagcctcctcgcagtccttctcttcggcggaacccaagatttcttcgttgcttgttaaatgttcttggctcagatcagagagtgagaattccaggctgtcctcccgccagatgtctgcagatttggagcgtttcttcttaaagctcgccgtctccatgaaagtgggcccattggatgtataggaatgctgcctcctgcctccctcagccaaatatgtagcgtcatccccgtaaagcctgctctcctcagtgtctggcatgctctgcacagaggctgctgtgaggacgatgctgctgtctacgctgggagtgacagaagagtcagtgtaagacacaggtctcaagcccatgtccactcggtccacccagatggggctcccgaagtcttctagggtaccatcttgggagaagggctccaggccattttcagccagggactgggggatgctgggggtgctgctggatcgggtgctcacttcggagttcctgtggatcaccttccccgaggaagcgtgcctggtcctccgcgtcttgtgcgagaggcgcagggagcgggaagtgtgcttgcgccccaggctggcatgcttttctccataaaactcgtgctctacatgttgactttctgcgtttcccatggttttatggtctgcagcaaagcggggggaaaggggagaattgagtcactattagtacaggtataggcatcttagagaaagcgctcagcctgcagggagggcagaacaccttggctcacaggggttgttaggtaagtaacagcacaacttcctatatgcacctggtaggttctcggactcttacctgggagcaggtgaacagtaacatcatctactgagactgccccctgagatgtgaaatgagctcataaatatgagcatcagagagttagacttgtctctgcccagagagaagatggccacaggccatagctgagagcgctgcttttggacagccagaaactctgctgaccttgtcttccttactaaacatttgaagttctgctcctatctatacattgaaaactctgaaagtacaaaccaaaatgttcaccaagggagtaatttctgtttgaaatgatacacatatttcaaaaaacaaaacttagaggtgcatttggtaacctccttccctccctgacaatgggtacgtttcgttttttcattttttttttttttttggctctatttgagctctaatgatacttcaaaatcaatcaaaaatggaaaacctcaaggtgtaagtctgatcaacttttcctagtaaatcaaagtcaaaaattaaaaaaaaaaagctttgacctttaatgtcacagccttctgagaacctggattttggggcatttggggagggctatggaggggtggtggggatgggcaaaacaaaatagaaaaaaatagaaactccgctctctgcttagcagtagattaatgggtttatttctgggagcaaatccaacctgtgaacattaatctggtacagcatgccctgcaaacagaaattcacattgtgaaaccactaagtgtgattccgccttctggggccccccaggttaattcaagtccctccttaatatttttacagtctctctcactgacccgatgacacaattctgttacccacagtgggaaagagaaaaatcttcaaagctcgacaactgtgactctacttagcctattcttgttccatgaagtctctctagcgcacttcaaattgtatgcacttaagataacgcacatgaaaatagctggaaaggaaagaagaaaaacagagtaactgggcatatctctgaggtggttcttttaaccacctatagagccattcattcagaaaatacacattgagcacctaccatgttctagaagccagagatacagcagtgaacaaaagggacacatcccctactctcatgaagctaatttctagccagggaaggcacgtgatagacaagaaagtaaaagcatcgtggtgaagcaggaagtgatattaccgtgatcattgcaaagagatcgaaagagcctggaacacaatataccttcacattgatcccagacttactctataattccactgttcaggctaaaacgttgctgaaactctcaccagcacatcttcactgaaataaaatttgtggcaacacaaagggaaaccctccattgaatgttccagtgagttcaggggtaactcatacagacaccagatgttaagctgttcccaggctggaatattccccaccaggtcacacatcacaggaatctcagagggaattttccaataaagacaatctcttttttactaggagcaagtagatttcaaagcaatatgttcacgcttctctggtatctttaagaagcaagaaaaaagataaaaacgaaaagatcaacggtctgtgcacaaccatttatattatctaaattcctaagaatggtacatgctacatttcttacaagtaaaataaataaatatgcatttcaataacactaaaggctttgaccaatgccttggagttctttatttttttaaagtacatattaagatacctggatgtgcctatgtaactatatgttttgccaataaataaagacttagaaccaatgttagtcacagccccattttaagactcacataggtttaaatttaaaagaggaaagaactatgaggaaataaattgagtaaaaggcaaaactgtcgcctcaaatatgctaagatttaccctcctctagcacatatatcaaaagtttgcaaacataaattgacacatatattttcaacaacagctttctggtaaggcttgtttctgccaacagaaaactcatcaagttaaaagcctcaggagaggtttcctgaaggaaatggccccaaccttcaagaattaccgcactacatgcatcacgctgatgggtctgttatattaatagcatttttagtagcaagattcttttcagctggccaaggtaggaaagaagccacttttatcttcagaactagaatgtagagaggaatgccaaatctcctaaatcctactaagagaaactctcaggggatggcctaaggagagtgagcaggaagtttgaagcaactgaagttaagaaaaataagtttctagggattgctgaaacacccttcaatttgaaagctgttcctgagaggttaataagaacgatgaaagcccatgtgggatcagcggaggactctgaaataacatcagcgtgaaaagttgaaattgctcattgcatacaggagacacaatctccacttcagggacaacccctgccccactggcaacccccagaaagttggtgaactttaagtttgtttgttttttttttttttttttgagacggagtcttgctctgtcgccccggctggagtgcagtggcacgatcttggctcactgcaagctccacctcccaggttcacgccattctcctgcctcagcctcccgagtagctgggactacaggcgcccgccaccacgcctggctaattttttgtatttttattagagacagggtttcactatgttagccaggatggtctcaatctcctgaccttgtgatctgcccacctaggcctcccaaagtgctgggattacaggcgtgagccaccacgcccggccgatgaattttaagttttaccctttccatgtacaaatgtaaaatgccagctacttccatcatcttaatttcttcctattcaatcttacttaaccctttttatttttatcttcaacaaacaaaacctgatttgcattttatatttgtgtgggttttgttgttcctgtagcccaaagaaagcaaattcagagcagaaattaacttttactttttttacggcttccacaagactagaaatattccacgcacgataaagcatcagtaaatatcggtgcattttagtaacaaaagcaaaaagtgaaggaccagcacctcactaacatcatcacacagtcactaggtaggagagagaatatttgggacaaggaggacaggctgaaatgcaaaaattgggattgacattgaaaaggtggatgccagaaaactggtactagatctcaagcttggaaacactaccagttttaaattcattaaactcttaatttcagactatgatttacttatatagaatgttagtggtcccacatagctctcatgtttagggactaggtaggagggagggaggacaagcttttagcctaagaacaactctccatattcaaacctcaagtctggcttctcgtgcttttctttctttccaatcttctaagtcaagcttgtccaacccatagcccacaggccacatggatggctttgaatgcagcccaacacaaattcatacactttcttaaaacactatgagatttttttgcaattttggtttttttggctcatccgttatcgttagtgttagtgtatcttatgtgtggcccaagacaattcttcttcttccaatgtggcccagggaagccaaaagattggacatccctgttctaagttctggcttccttagcctgcctcagggcctgtgcctgtccctctgcctagaacgctctgcctttccgcctactccaccaagttccttcagaccttcaatcaaatgtcccctggtcaaggaggcctttcctgacccctcctccatctaaaatgacaaccagtgctgcagcactcaacatttcttacccctcttcttttgctttgccttcacattgatcataattgtaaccaacatatatttcacttactggtctttcttattctctatcctttcccactagagcctaagcttcaggagggctggaagtgtcttgtttcctgctgtatcctcattgcctagaacccagcctgaaaggttgtaggtggtccattaaaaaaaacaccaaaaacccaaaagaaaaaaaaaaatactggaatgaatgaatgacaaagacactttaatctaagatgtgaaaactcatacaactacaatgcaacataggtgagaacatgaccacaatgctaatgagacacagcacacatcagtcttaaatacgctagcctcttctctcaggatgcctggaagaaacttcccaatcagctctctgctctctgggtcccttccacctgcaggtctgtgtcagtcccttactctggaccactgggttgaaggtcatcctgatccatgaacttaggggtgagggtgttcagcttgtgctccagtgtgttcccctccccacccccaattcttcctggggaaagaattaagggcttgcacctgtctaattccactgaattcttgcctccagttcctatcttcctcttccttttggagctgcagtgcagaggttcaggaatgaggttaagagttgagagggcaagtgtagaactgctcaggcctaggacgatccagagaaagtgagagcaaaggagtcttagtggcatgatgggcaagagtgtcatctgaaagtggtatggggtcaaagcatcaggagttcctgggggagtgctcagggccagggatcaaagacaataggatgagtgtgatttttcttttcttaccaacaccatgatccctctcttaaagtgataagttaaacttttcaataagtaatcaccttaagggcctttaaatcccaccaaattaaatgcagatgctcctccatttatgatggggtcatgtcctcataaacccattgtaaggtgaaaatatcctaagtcaaaaattcatttaatacacctaacctaccaaacatcatagctcagcacagcttaccctaaatggctcagaacacttacattagcctacagctgagcaaaatcatctgacacaaagcgtattttaagtattgaatgtttgttgaatatttatttataataagtgttgaatatttcatgtaacttactgaatactgtgctgaaagtgaaaaacaaaatgattgtatgtgtaccaccgtaaagttaaaaaaacacaagtcaaaccaccctaagttggggactgtctatacatagtaaaggaattaaaaggtattttaagaaactttatcaatatacacaaatacttattagttagggtggttcatatatatatatcaggtaggtggtcatttctcaggggctgcttttatagatttattaggctactaagccttttgtaaaaaaaaaaaaaaaagatatagaactatacacatatattgaaacaatgtcaaattcctggctttagtattttactataatcatgtaagatgcaaccattagaaaaaactaggtgatggttacatttcctgcatacaatttcctgtgaatcataattattttgaaataaaaagttgaacaaacaaaacgagccttaactaactaactgaatattctaatgaaactgtagtttaaagtaagggttcttccaaaagaaatatagttgaatccccttttatttttagctgaaaagcatctagaatattctaacataatttcaatgaattaggcaacaacaacaacaaaaaagcaagcatttagcatcatctggcaaaatgtgatcagaaagtacaaagcaaacagaacagtggtccaaaatgaggttaaataaagaggtgatgttgattataggataaagcttctgtcttaataaactagtgaaaaaaaaataagttgttaatatctggtgccagcaagttggagtaaaccaactaaggcctatcttgccccagctaatgacaactaaaaactctggaccaaaaagtaaacaaaagcaaacaaataaaaaaataaaataaaaaaagatcaaaacctgaggatgccacccatttaagggtgagtttcctattttgtttttgttgtcctaatttctcacccagccttataccaagggtgagtacggctccagtgaagctatggcacaggcaacaaaaactctggatcagaccttgttgttccacccagaggaatcaagaatggtccctgtaagccagagagagtgtggagatcttagagaaaagagaactggaaaagaacatcccataatggtgtgtataaatctgcacaagtgacaggctcactcctcagatgcacatgcctaggactgacccaaagcaagatagcaaaagctttgagaactgaatcatgacataaaccacagcccaaccctcagactaacccctgagtggcacaaaaacgggacaaactcaaagcagtataccaaaggctttgaaaactgaactgacattagagcctccacccacggaggtgagacagcacttacaatctgaaccaagtcaggttgactgcctgcaaaataacaacaaggaaaaatcaatattctccagatgatgtaacaatacctggagtatcacaacataatattcaaaatgcccacaatgcattccaaagaaccaggaaaatttaattagctctcaggggtaagtacaatcaatagatgccaatcccaaggttgcccagatgttggaattatcacacaaagacttttaaagcaactattacaagtgtgcttcctgagtaaatgtaaacacccttgaaattaatgagaaacttaactgcttgcaatgcctgtgcaagatcattatgaacatcaatgatgatattaatacatgagtaaatgctgggcatggtggctcatgcctgatcccagcactctggggggccgaggtagttggatcacttgaggtcaggagttcgagaccagcctggccaacatggcaaaaacccatctctacaaaaatacaaaaattagccaggcatggtacacacctgtaatcccagctctacttgggaggctggggcaggagaatcacttgaacccaggaggcagaggctgcagtgagccaagatcgtgccactgcactccagcctgggaaatagtgcgagactccttctcaaaaaaaaaagtacatgagtaaacaaacagaacacacataaaaaagaaaggtcaaccctatatgacccaagatacagcacgtaccttgcatttttaaaccacctgtactgcataagaaaatattccagttaatagaaagccaccctgtgttcaaagtcctgggcataaagaacatagaaaaatatttccacaaccacagattgttgagggaaaacaggaaagaaaaagacacaaaggaatctggaaacaacttcatcaccttgagaactaaggaggttataataatatttttatggtttaggatgtctaatgccctcaattacaccagcggttccagtggtgctcctagcagacagcaggacaggatgcctcaccccctagctgaagaacaggaaacttccacatgaacaatgcccagccctgtgggtcagctggccagggcttgccccgtgtgggagtaaataatccaaaaggtgattctaccactggggtcaaacatctctagtgcaaaattcttctcatcttccagaattaaaatctgagatttgagatgcacgttcaacatacagaccttgagacagctaaaaattttctccaagaatattaagatgtggctgggggcggtggctcacacctgtaatcccagcactttgagaggctgaggcaggtggatcacttgaggtcacgagtttgagactagtctggccagtatggtgaaaccctatctctactaaaaactacaaaaatcagctgggtgtggtgggggcggggggcaggggtgcctgtaatcccagctactcgggaggctgaggcacgagaatctcttgaaccctggaggcggagactgcagtgagccgagattgcaccattgcactccagcctgggtgacagagcaaaatgctgtctcaagttaaaaaaaaaaaaaaagaatattaatatgtaaatatttcacatgcatatacacatgataaatctgcgtaagaattttaaaaagcaattattccggatggattgcttgtagggcgttttaattttcacaattatacctttttttggtattttctaatgtttttatagtaaatacgtaattcactttaaggaaagtaaaataaatagaacatgccaacaggtttttaagtcaccgaatttttttttacagttgaagagagtaaggatgtgggcactatgctgacagctacaacaaaacggcatcaaacccaaactctaaaacagatggcctggaaaaattacctaagatgaagaaaatactacctagcttggacttattctactttttcgctatatttcaatggcacactgacctcctctcattgtatctatggcagcgttatttgtacactggcacatttgtcttgtttttaagtaccctcttctcattttattataaaatctcaatggcagaaaccatctcttacttgtgatggtaacctaaatatacggaagttttcgtctagctcttctgagtgggaatgttcaacaccgacattgccttataacaagggcacttcaaatacataaaaccttagatctcactggtgggtccatgatcatccaattcatatcatattcaagttaactgtgaaagcaaggtttctctgtcgttgggaaggacattgtgaaatctgaccataaggcatttaatgatgtaagttataatgattaataatataaattttcactcccctgaggtatttaaaaacttattaaaataaacgtaatcattacccttctatgacttgaaaacaggcctccaaaactgcaggagaaaggatgaaatgtatttatttctaagttaaatttgaagcgaaatcacaagacaacagattgcaaatgtaaaattagattctagtgggaggtcttggtttcaagcctgttttttccctactggaggctgagcttgaagacggtgttggggggtgggggtgagggagagctaagattaaattgagacgaagttctgaaagttttcgctaaatcgttacaacccatgaaaagagttttgccaagtcacacacaaataccctgaacaccagagactaagcaggaaagttttgcaacaaatataagatgatctttgattttgaaaagattattattttgactgtgtttatttttacttttcaaagattatccaaagcagaaacaaaacatatcattgttttcaagtcagattttgaagctcgggtttgcctttttcaaacataatccgatataaagatggtgaagcccagggataaatttacgagatcctgagggcaattcacagcggagaaaggatttcataggcacctactttgtcttttctgttttgttttaacgctaatgctttcgaattgtcagataggtgtaaccctaatccaaggaagtgattccaaattctttttcccacgagctacacacaacaatgatagtaaaacgtatctgtcccaccacctttgaagcatttccattaattcatacaaacatataggctcaaatatacatatgcaaacctaccttaaaaggcaacagtggtccccagcccaacttgctccaagagcactgtggcatttagatattgaggttggaaatgatgtccggatgaacagccacagggctggggacgatgtcagcacctgccccctgcggtggccatcacagtttcatctaagtctgtgagaatgcgccaaaaacctggagaggagcaggtcagaggagatagaaaaacagaaagaaaaggatgaggcagaaggaaggaaatgggcattttctgtcaaacccatttcgtcaattccatgacgtcaactttttgtgaaatactgtcagagacgtttgaaccacagcaactccatcttaaataggagctgggtacaatgaggctgaaacctactggtctgcattcccagatgcttaaggcattctaactcacgggatgaggcaggaggtcagcacaagatacaggtcataaagactttgctgataaaacagattgcagtaaagaagtccgctaaaacccaccaaaaccaagatcgtgacaagagtgacctctggtcatcctcactgctacactcccaccagcaccatgatagtttacaatgccatggcaatgtcaggaaattaccttatatggtctagaaaggggaggcatgggctgggcgtggtggctcatgcctgtaatcccagcactttgggaggccaaggcaggcggatcacctgaggtcaggagttcaagaccagcctggccaacatggtgaaaccccatctttactaaaatacaaaaattacccaggcatgatggtaggtgcttgtaatcccagatactcaggaggctgtggcgggagaatcgctggaacccgggaggtggaggttgcagtgagccaagatcacacctttgcactccagcctgggaggcatgaataatccaccccgtttagcatatcatcaagaaataaccatgaaaatgggcaaccagcaaccctcggggctgctctgtctatggagtagccattcttttattccttcactttcttaataaacttgctttcactttatagactctccctgaattctttcttgtgcgagatccaagaaccctctcttagagtctggatcgggacctctttcctgtaacaatatgacatcccaaatcaaatgatgcaacatttggatacaggcataaaatgacaggcttaaatcagataaataaataaatacacaccagcctatttacatttagggtaatacatagccctacagactaagttatcttattattttaatctatctgtgtatattaaggtgttggacaacagaaacaggttactacagaatgattcccatgtcccactcaatcttcagagtctcaagaaacagaaatgaaaggaaaccagcaaccctcagttattctcaaagtagtgctgtatttataacaaacattgaagaaaatgctgaaagagagtaaaacagaagcccaaatcacttacatagaactttccattgtatacacgttttcttacgaaggcaaacatcaaattcagagaaaatgcatgaagaatatgcacaggaaaaaatttaggtaaaagatccaaactgcaatttaacatggaaaatcaatggacaagagctccaggaacacgtggggttaatggggttgttttatttccttcatctttttaaagcctgctggtagaggtgaaattacaaatactaaggcaagcaaaagaaaggcctgaagggcctctttgggtggcttcattttggtactttcttcccagacattcccctggggctgcccgctgctggtggtttcagcaggtgggaacctgagatgacaaacactttgagcaggaatatgaagaaaactgcctattttgtggaaaggagccacatacaggcagtaaataaatatatacgtctatccagaatggaacaataagcaaagacagttcttccttatcttggaaaatatgctatttaaccatgaagttagtgactcatgcttgcagggaaaggagcacgagttctcagcaataccccattattaccccacaatatattccctttccacaattcccccattgctacccggttggctccctttccctgggcatcctccttaaacggctctctgcgaatttccgaatttccaaagcagttcctgaattgcttaggaactggcagaaattaataagcaatagcccatttatgctgaaatggactcattacggtgccagctgccaataatttgcaaggctggattcttcctggcaaaggaggccggcaggcggctgtccttccacctgcacaacggaggctgataatgcattttctatactttaaaaaaattacgtattcagatagaataaaattttttctctatctatattcttctagtccctgaacaaaaaaatatataaataaataaataaacaaaaaaaaactatacagagagaaagggcattatttgaaaaacacgaaggaaagcaaaacggagtcgatttggtataacttctttctgactttcgtggggaaaaaatttgcctatgaccctggttgcggaactgatccatgacatggactaatgaagagctccacaatcagcagatatgctaaggtcacaatgtgccaacaagtacgtatccatttcccttacagcaggttaattgtctcatggccttgtgaatggatgccaccatggcaatttgggaactatcagtactctgggttttctccaagagctgcaaagaactcagtttcactgggagacagctacgtaccaagctcagtgttgggagtccaagctgggagtcgggctgcacgcatccggtcatatcttggctttgcaagtcaaatctttactttcagcgtgacttggggcaaactctaaatgtcctatccctctaacaggtggggatgataagattcctaaatcattgggttgtcatgagcattaaatgagatcatctatgttacagaatttgcctcgtgcctatcccattatcgtttctcaataaatgttaccctatctcaggatcggttctcaataaacattagctattatttccactactatttaaaatgtttaaaccataaagaatgtgctacagaatgggccagtattatgcaggcttccttagcaaaatgatacctaattcattgaaactgaatcatatgttataaattgaatgacatcagtcaccttaaatttgctgtggaacaaggagagttaactaatccagctagaagatgcatgcggtctactcaatcggctacagctcacacagacacacagacacacacagacacacacgcgtgcgcgcacacacacacacacagccatactgatgaaatccagcagtaccagtaggcctgcttacattatgttaagatgactcctagggaagcgaatgctgaaattaccaagtttttcagtctcactctgaggcatccttgatatggtttggcagtgcccccacccaaatctcatcttgaattgtaactcccacattcccacgtgtcatgggagggacccagtgaaacgtagttgaatcatggaggtgggtctttcttgtgctgttctcccaattggtgagtaagtctcatgagagctgatggttttaaaaagaggagtttccctgcacgagctctctctttgcctacggccatccaggtaagatgtgactttctcctccctgccttcctccttgattgtgaggcatccccagccacgtggaactgtgagtccaattaaacctctttcttttgtaaattgcccagtctggggtatgtgtttatcagcaggatgaaaatggactaatacaatcctcaattcatatggccaatttctgtgtcatgtgtcaaataagcagttttcacaggaaaatgtgtgtactggaagtattaccaaaactaatctcaggcttcaaatacccgcaaaaattgatggggctgagaagtcccactgctccactcctgtaatattatttaagatgaaaatacggtgtcagaaatactgtgtccacagcatttaatccttggcttttccaaaaatgtctgccaaaccagaactttctttttcaccttcaaagtgtcaaagacacttgggggtgggggggcaggggacagacacagtggctcatgcctgtaaccatagtgctttgggaggttgaggtgggaggatggcttgaggacaggagttcaagaccagcctgggcaaaacagtgagacacccacctctacaaaaaataaaaaaaattagctgggtgtggtggcgtatgtgtactcccagctacttgggaggctgaggtcagaggatcccttgagcccaggagtttgaggttatagcctgggcaacaaagtgagaccctaactcaaaaaaaaaaaaaaaaaaaaaaacaacgacaaaaaaacacactcataagggaaattctgtcatttttaagtccttgcaagttccaggcatcagtgtgtagagaaaaggatactgtattgtatttgccctcaaaatacccaggttcaattcaggtgctattacttcataaataaagtgacttttggatagtaaattacccattctgaaaaccatcagaaaaaatgaggacgtaaatattatttgtcttatcaatacttacctctaataccttttcttataggaaagaaattagataatcaacatgtaacactataaactataaaatttatgtaagtatggaaattcttactgtgtttactacgatttagtgtccccaaattttccataaccagtagtttaatgacaatcaggaggttttcctttacattgagcttaaacagtgggggcagaagtcttggatcaaaatcctaaacatgtatttcatatgcaataagcaccaacagcctttagcttttaacagtcatacttagaccccaaatcagtactgacagataaataggtggatggtagatgggtagatgaatggacagataagtggatggatggatggatggatggatggatagatggacagacggtgatggataatagatatatggatgaatggtagatggatggatgggtggtggatggagatagagatatggatgaatggtagatgggtggatggatggatagagtgatagtggatggtgaatggataattgatgggtggtaggtggatagatggatggtagatgggcagatggatggatgtagatggatggatctagcacattagaaaattttaagtggctcagaaattaaagaagtttcatcactttttaaactgttacttaagaaaaaacttgggaatgacttctaaggatacacaatttaaaaagtaataggaggaatgagggtaaccatgaatatcctgttgagctacacatctagctccatttaacagtaagctttataacagccaagtcaaataggaaaaacatggcagttgtaaatttcacaatgtccaaatcgatggctcaaaggaagcacaaaagttcttggttcttggtactcggatcaaacaggcatctccactggtgttcctctgaggccactgtgatatgatgagcaatgctctagacctcatccttccacggaggctcagtgacaaatttcataggaatgtttcttgtcttgaaaattatttttttaaaaaccgcaattcagcagcaagcagccgtcttgaagacgcaggatactgctgcagagtggacagacagtgttccttccaggaaattcttcttgagcactgcctgccctccacggagtgcagaagcatgactgagtgggggtgaccttgagatggactctctggctcacagctgattgtagctgggacatgctgacagatgaccacaccccatctggtgtaaagccactgttttcaccaagggtgtgtctgtctggcttctgtgaaagctgagatagcaataaggattcatgcacaaagcttcctaccttcccactgacggccctggggcagggccaggactcccagtgaaaaaccaatccctccgaacagatgaatgagccatgataagggccccaagttcctactccataaagcatgaatgaaatagttttagccccaccatatttcaaaggcaggtataaaaagacacccaaatcagaaaattattaaaaagtccccagaactttccatatccacagactgccctagttttgggcaatgttacttcctaatgtatccaaatatatcctaaataaactaagcaagagaacagattcatacaatcaatatgtttaagtcaaccacaagttgggaactatctaaaatcataactttaattttagagcggtaaatctttgacaatacttaatcaacaggttcagccaggacagacattaccatatttcttagaagtaaagtcggtacatttcaaagtgaagttactatgtatgtcaacttagggcgagctaccatttatggaaagcttactatctggctggcactgtgttcatggcatcaggccaaagtgctctttagacttcccctaagttcttggtgtttatcaccttgcaactacacctttgactgacagctgccaacatactgcaacactgacaccacatcacttcctgcaaagcttcctcccaacagggtttagaagccaccagacccccaagggctgtgttacatggccagtgtccaaatctcccaaatattcatacagcctgactctaggaatggttcaaatgaggccccagctcgctgaaatggatgtaataactttctcaggacacaccatgagaatcatgtgctttctccaaaatccaagcagcatctcttttcccatttctttctttctttcttttctttcccttttttatttatttatttatttatttttgagatgaagtgttgctctgtcgcccaggctggagtgcagtggcatgatctctgctcactgcaacctctgcctccgggattcaagcaattctcctgcctcagcctcccaagtagttgggactacaagcgcacatcatgcccagttaatttttgtatttttagtagaaacggagtttcatcatattggtcaggctggtctcaaactcctgacctcaggtgatccaccctccttggcttcccaaagtgctgagattacaggcatgagtcaccgcgcccatccccttttcccatttcttaaagccgcaaagctactgaacacttgggaattccacccaacactccaagagtagtttccatggaatgctagaacacagctttgggctcgctcttggctcctaaattccaagtttcagtcacatcaaaaaagcacgcttacatcgtaaggcagggtagaacatttgatccccaaagaaaatagaaatggagctgaatgtcattaacttctaatgcttagatctgtcctttgctatttcaccacactgtggcttaacgtacagggtgttccctgtgagagaactaggtaatctaagctcgtgcaagaagacagtgggagaggacagtattcattctcagtgttttcatacctcctatgaaacataagagagtaataatccttaaaccgcacaccaaaataatcgcctcaagaacatatcaacaccttggtttagaagagatgtcaaaatcaaatcactttatccaacaactcattttccaaaattgagccacccttaggtctcttcccttggacagagctgcctcccactcccatgtaagttgtagaagctgcaacaggcacaggaggaagccacacttcctaggacacacagcagggggggtggagggtaaacagagctcctctttcactgtcaaagactgaagttccaggaaaggaatttttttattttttatttttttgagatggagtctcgctctgtcacccaggctggagtgcagtggtgcgatcttggctcaccgcaacctccacctctcaagttcaagtgattctcttgcctcaacctcccgagtagctgggactacaggcatgtgccaccacacccggctaatttttttttgtattttttttagtagtgatggggtttcaccaagttagccaggctggtcttgaactcctgacctcaagtgatcagcccactttggcttcccaaagtgaggaatttggttctaattctctgttttccaagcctgaagttcagccttgagccagcctggagacaagggagtctccattccaagggacatggcccaacatgggaagtcagggaaaaaggcaccgcaagggactctcagactcagcagcttctgtctacctccaagacattctccagacctgccccagtgacccaaaagcacgaaagtgcaacctgcaatttccctgatggcctctgacccctacagcctggcttcccctaacctgttcccttaccatgcagccaagaggaaagtctttcagccaaaaatacagtcaggatatcaagaggtccccttccttcatcaggaagcagaacaggatgtggtcatcagctatgatttcattccccaagccacccccccaagccaattcccaacccatagctgccttcgcacacagaggggtgtggccactctggaatcagggaagagcttgtggggggggcggtgaggccatgaactcaagaggccagggtggcaactaagcctgttggcaacaagggctgggactgcctgcatccagacaacagagaagataatcccaagcactgctggaaaggtcacggggatggggtgtgaaaatctgccttgttgtccctggatgctttgagcctaaagggcccatccaaaaagaatcactccccccatggacttgctgctttcaccttggggctgtctctgctgctgttgcacttgtgttgacggcatgaaattcttttaacagaacatggttaaagagagatttcacgccaggcatggtggctcacatctgtaatcccagcactttggggggccaaggtgggtggataacttgaggtcaggagttaagagtccagcctgtccaacatggtgaaaccctgtctctactaaaaatacaaaaattagctgagtgtggtggcccacacctgtaatctcagctactcgggaggctgaggcaggagaatcgcttgaacccaggaggtggaggctgcagtgagcgaagatcacaccattgcactccagcctgggcacagagtgagattccgtctcaacaaataaattaattaattaatcaattaattaaaataaaagagagagttcagtcttccagataatgagaaagcttttaaggctatgacattgtaagtggagaggaagaaagagaatctagaaatattaagtatgtaagtgtgtgtatatcattgatcagcaacttaatttaataactaaaaggtattgggcaagtatgatagttgggaaataagagtttccatatgtaaaaagtgaaattgtaataggatcctgtgttgcaccattgctagggggatattatgaatatcatcaaccttgatatgtgtttaggtagcataacctaacagaaggattttaatcaaagactaaataaacatcgcagtgcagcaaagaatattgcattttaaagttaatgatttaaaaaaatatttaaagggtccaggcacagtgagtggctcatgcctgtaatcctagcatgttgggaggctgaggcaggaggacgacttgggcccaggagttcgagaccagtctgggcaacatggtaagacctcatgtctatttctttaaaataaaaatatttaaaggactgggcttggtggctcatgcctgcaatcttagcactttgggaagccgaaacaggaagatcacttgagctcagaagttcaagaccagcctgggaaacacagtaagacatcatctgtaaaagcaattaaaaaaaaaaattagtcaggtgtggtggcatgcacctgtagtcccagctactgggatggcttgcccgggaggatcacttaagcccaggagatcaaggctgcaatgagctgtggctgtgccatggtactccaccctaggcaacagagagagatcctgtctcaacaaattgtgtgtgtgtgtgcatttatttatttaaagaaattcttcccacagattttcaaaatacagatgattcttttgaaagagaagaactgaggttgaaacttgaggactttgtcagaggtaccacaagacagagtgacgtaaccatggtcaaaaggccttgagtcccaagtcactccctgggcacttggtcccaaattctcctttagtcactcctcattttaaaatggaaaaaaaaaatgaccttaagtttttatttgcaaatcatttcaagttgtttcacagttatacaattaagactacaagctctaacatgtaaaaacataattctttatttcattgattttaagaaacactatttttgactcttaacatctttgaaattgaatatatcttacaatcacaatggtgtattggggtttagtggtgccattttctctgcttcttagtggtatgcaaaatagtggtgcattttacaaatgacagcatcttatgaaaaagagtatataaaaataggcttctaaatagctacgcttagggctatctaaaaactgcttatgaattgtttgggtaagacagagtatctatgtagaattttactgatgatcacacattcagttcaactcaaccaacattttactgggcacctgttatatgtttggaatgaggaaatagaccatttctttatgatgcatataatctgggaagacagtgggcatctacccactcagacagggctgtaacagctagtctggcattattaatagtgaaggatgtgaagaaatagactaattctgctaggagaggctctcggttgaacctggtcctgacaggttaataggatttggcttagcttaggaggatgagaggaaatgaacagggataggagagagtttacacaaagagaaggacagaaatttccagtaaaagagaagggtataagcaaagactctgaggaatgaaagtatcattagcccaatgttgcagtgaggcgagtgcatgggaaaaagctggagatgatgaagctaaaaagatgggctggggctatggatgctacacaaaggaactgaacatgattgtatttgatgggattacacgatgagattttattatgggagttacatgatcaaacatagttttcccacctgggtagcttggaagagaagggaaagacttattgcaagccatcaataagttgggatggcccaacggggacagtgagtgccttggagtagtgagaatgacaggtaggatcaccaggactcggtggccacatacatcctttgaggaaagaaggaggaagaacaaggaggcatagacttctctgaagttcctggcttggtaactgaaatggaaggtgacaataacaccttccactctgaggtataatcaagcaccagattcaaatgttatccctgaggggccacaattcactcacagtgatcttactggaaatttggtgtccattccacaaaggacctcaaaaacaaaggactggaacccactagaacagcaatacagttaaaaaacaaaaacaaacaaacaaaaaaaacaaccttcctgccttagtatgtttgggctgctataacaaaataccttagactgagtaatttataaacaacagaaatttcttgctcacagttctaggggctgggaagtccaagttcaggttgccagcagattcagcatctgatgagggcctgttcctcacagatggcaccttcctgatacatcctctcctgatagaaagggcaaacaggctccttcaagtctctttcataagggcacgaatcccatttatgagggcagagcactcatgacctaatcacgtcctaaaggccccaccgcatgatactatcacattcaggtattaggttccaacatatgaatttataccaacattcagagcatagcaactcccaaaaaacttagatcagggaggatattggaatggagacacaaataatggccaattccaatgcagatttatggaacttaaaacacacacaaaaacaaaaccaaaccctctaattatccatgagaggccagaagtttcaaacattatctcaaccacactttgtatggactaaatcaatacctgtaataataaatggatttaacagcttcaataatttaatgcaaaaataaaaataggatgcctcagccttggcatcataaagttaaaaagtaaatcagatttgggttcagtctccaaaatattctcaggctgcaggaaacccaccatgctgttgactcacatcttgaactcactcttattatttaaataagatcactgaatgcaggcaatgatcaaagctgtacaaatcacagtgcaatatatctgcaatgcataaataagcatgcccaagtgccacttaaacacatgtagcatttaagaacaatcatttaacttttctgtgagtgtataaaataagaagtcaatagctttgcaacaccatgcagatctcaggcaatgccctggtttatgtgagtgaccagaccagcaaaggatgagagtggagcacatggtgatgggcacagagggatggcaagaaagacatgggttaactatgggacacaagtgacttggcccaactctcctaagcacccattctttttaaagttaggtggatggtctggaagtttttgtgctccctacgcctggaaagaagtccatatttctttaactttctcaagtcaaaacccacgggcatcacaatggtaaccaccatgagatttttctctactgggtattcttttttcagtataggtgattcaattaaggcaaaagtaccactgagctggaccccagaaaagtgacctaagctcatttaaaagccggtgcaagatattttggctgtacaacaattactgttcatcctagccaaatgacaaattgggagagaataaaaagcatatgaagtcattgcgaatcagatttgttatgtagaagaaaacaaaaatcaaacagagcccatattcccctccctaaaaatcataagaggataatcagcctcttttaatataaaggcaattcctggggagtcatgggaacgtttctcaaacagtgatacatcagtccccatgcagaaaaccgatacataaaatcacaaagcaaatctgtttctagtatgacagcaacaggctttaaaagcctgacattcactgccaagtaatatctatgggaccacacacaagggaagtgaaacagacactaggcttgccctctacgaatcaatgagtatactcctgtccagggcactatgatgcaaatggttttattggcatcaccattcaaaaaaatagttctaagcatgcccaccccgaagagtatgcctaccactgctgatttatttaatgtatatatacttgaagtactgttcaaatacattatgcacatttcaattttctgtatgtatttatatagcacataatttatttgaaccaacagaaatctaaaggcaaaagatgaaacataaattttgaaatttcctttcatgccctgatgaattcatcttgcacattcatctgatattgaaggccagtgctcaaggaaatacagggccgatctgggacctaccaaaaaaaaatcaggaaaggcaacttgtggagaactcaggctcaaaaaacaaacattggctgggcatggtgactcacgcctataattctatcactttgagaggccacagcaggcagatcacttgaggtccggagttcaagaccagcctggccaacatggtgaaacctcatctctactaaaaaaaagaaaaaaatatataaaaattatccaggaatgacggcgcgtgcctgtaatcccagctactctggaggctgaggcaggagaatcgcttgaacccagaaggcagaggttgcagtgagccaaggttgccccactgcactccggccccggtaacagagcaagactctatctcaaaaaaaaaaaaaaaaaaaaaaaaaaaaaaaattagcaacagattatggaatagctttttaccaaagaggatctgttttctgctgatggcgactgcttttgcaactagcaaaccccacctgtgtttcctcagtttccccatctgtacagtcaaaatattatctacattttagccttattacgaagtcatatcatgtgcgagggccaaaatctcccagaatcttcaggaaggtagcacatcaccattaaggagacatgtgctgatatcctctggctcctctgaaatcatctggtgatagcactagcgctcactagggaccactaaattcagctgtgcttttgcaacaacgataataacaaattatcccttcaccagtagttaataaaaccgcaccatatgtagaagaagaaaattataagacagaagggctcatctccacccaccacaagtcaagacaatactgtgtattgtgattcaccaagatgcagtaaacaaaaaaacacctttccaaccataactgcatttctcagtgtgggtgatttcagacacagccagggtaagaagccaagaaatttcagttctacagtctggaagaataaaggctaacaacaacaggcaatgaaaaattatttttaaaaaagttatacaaaacttttctcctcatagatagaaacaacaacaacaacaaaaaagcttaatcttccagaaacctgtctctggccagcttccaatccagaaagtctgctgatgatggaaggagctctccttaggaactcatatggctatgacctcccatctgcatctgatcctgctgatctgcaccccctccaaaatacacacccttccctcaaattccatgcctttatttatttatttgtttatttatttatttattgagatggagtctcgctctgtcgcccaggcgacaacacaatggcgtgatctcggctcactgcaacctccactcccaggttcaagtgattctcctgcctcagcctcctgagtagctgggactgcaggcatgcgctacaacacctggctaatttttgtatttttagttgagaaagagtttcgccatgttggccaggctggtcttgaactcctgacctcaggtgatctgcccgccttggcctcccaaagtgctggaattacaggcatgagccaccgtgcccagccgaattccatgcctgtataaccctcagatattcctcttgccccaactgtaggttctgcccacagccttctacatggctccatctagttccttccagactctccttcttcagcacaaatccctctttctcacctcctgggattatcctactgatgatccaccacttagggtcaaaacctttcacccttatgagggcagcgtgattggtaaatgtaacataggcttaggatctgagagacctgatcctaacctgccattcactgcatctgtgaccttaagccagccacttaatatccctacgaatcactttctccatctgcaaaacaggatacctgcctgcaggtttgtgctgggaattaagtgaggcaatgtatgtaaacacactttttcttggtatttagttggagcttcatgaatattcatttctttctttcctcttgtgtccttcttccccttgttcttccccgaaggtccctgaagtatcttctacatcttgtctcttctattcctacccttctaatccaggtcaggtcaccttgctttcaatttccttttttttttttttttgagacagagtcttgctctgtggcctaggctggagtgcagtgatgcgatctcggctcactgcagcctctgcctcccgggttcaagtgattctcatgcctcagcctcccgagtagctgggattacaagcatgcgccaccaggccaggacaatttttgtatttttagtagagacggagtttcactatgttggctaggctggtctcaaactcctggcctcaagtgatccacccgcctcagcctcccaaagtgctgggattacaggcatgagccaccgtgcctggcacttttttttttttttttaagacaaggtctcactttgttacccaggctggagtgcaacgcggtgatctcagctcactgcaacctccacctcctgggttcaagtgattctcatgcctcagccctccaggtagctgggatgacaggtgcgcaccaccacgcctggctaatttttgtatttttagtagagacatggtttcaccatgttggccaggctggtctcgaactcctgacctgaaatgatctgccctgacctcaggtgatccacctacctcagcttcccaaagtgctgggattacaggcgcccgccaccatgcgcagctcatttttgtatttgtagtagagacggagtttcgccatgttggccaggatggtcttgagctactgacctcaagtgatttgcccttctgggcctcccaaagtgttgggactacaggtgtgagccaccgtgcccagccaagatttactttaaagaattggctcatgcatttgcgggggctgccaagtttgaaatctgcaaggtagggttggagacccagggaaaaaatgatgctgcagtttgagtccaagggcatctggaggcagaacttcttccttctcggggacctcagtcttctgtcttaagatctttgactgattggatgaggcctaccaatgttatgaagggtcatttgctttactcaacccctactgatgtagatgttaattacatccaaacataactgacagcaacatctagacatctagactggtatttgaccaaacgactaggcaccacaacctaccaagttgacagatcaaatgaaccatcattccccacacaacagactttttctccagtgcctagtaatgccatcaatattagccaaaggaagaaagagaataaaatgtattcccacagaatgtctacaatgcaatatccaacaggtgctcctgacagactctcttccatcccacaaggccacctgtcctgtgctctgaagggaggtcagctcaggtgttccaggtagccacagtctccggggcatgaagaggtcgctgcgaagagcggcaagtcttgcagaatgtcttcctttccatatatttcaagacaattgcaaccatccaagcttttgtctcttggtagccaacatcatcaagagtggtgactaccttttatttcaacatggaaaactgcattaaaatatatttacagattggaaaacacacatatccaggaacaatgtggtagtttataccacagcttctgattcttgaaacagccgctacttttaaccaccctccctcccctcccaacaaacataaattatggaggtcctgggtacataagctaccctgttggtgttatttctgctctagtcttggatctgaaatcatcaccctctcccacctctaagccaagacttcaagcacacagcatggtgagggtggggggtgtccccagcaagtcctcaattccaatgcagctgggcttaaagttcagcatgaaaggccagcagtggggagggaggttggaatgattgttcaacagcctcccactccctgctcatgactaatgcatcatactggcagagcatttcctcccagctagtaagaactgacaagtcacatttaaaccaaaccaatgccaagaaggctcaggaggcactcagcccctccaagccctaactatacccctttctgaaaatacccatctagagagaaagcaagctgagagtgttggcttaggagtcctttctaactctgcttctccaccacagagcagggagtttgaattttcaagggtcaaaacaaagaacatacatagtgggtaagcaattggtattccattttgagcaccagggtaacctgttaacttcgggaaaatcagttaatttctctgtggtttcaggttcttcctcagtaaaatttagcacctagtaagggctttaaaaatgttgggcttcacagaaaagagagccgttgggtatggtatgtaaagagaaaaaacatgattgtgggcatcattaatgtagagatttatttttccagtagtgattttccattcaaaatagcatccatgagaagaaggagggaaattaatcaagtgtattcactaaatagagcttggtgatcaaaataacatcagccttctggttctgcggctgcctcactcgcacaagcacggggaagggggccccgcacacggcctgaacgcatgttggcaccagggtggcagctcttgagccacctgtttggttctgtttctctcactccgtccccacactcacaggaacagcctgccatctgcgctgcgccacccagcacagctcggttttccataaaggtaaataagatcctgacgctagttttcatctaaaaatttcccttcaatttatggcttccagacctccatctcaattcaactcaaccccattcactgtcaccatatgcttagcacccaccttgtggatggcatggttcaagattccacacagcatggtaggacaaggaaggtttaagacttcttaaagggtcttaaagggccaggtgcggtggcttacgcctgcaatcccagcactttgggaggccaaggcgggcggatcatgaagtcaggaaatcgagaccatcccggctaacacggtgaaaccccgtctctactaaaaatacaaaaaattagttgggcgtggtggcaggcacctgtagtcccaactactcaggaggctgaggcaggagaatggcgtgaacccaggaggcggagcttgcagtgcgccgagatcacgccactgcattccagcctgggtgacagagtgagactccatcacaaaaaaaaaaaaaaaaaaaaggtcttaaagattatttgggtgggtagcaatgaagacatgagatggggaccccaaaaatgtaatctaaggctcaaaagttaggtgccatacgataaactcagaggctatgaagagggaggcatgcaacttaatgaaattctttatgatgaacagttaacaggttatcctagtactcaaaaggaataccaattgccacaggatggtaatagagctgagagtctctacaattcaatagatgcccttaacaggacaaaggtaaagaatacacgtaccttttgagaatatgcacattaggattctcaggttcttgactctgattatttttgtttgtttgttttttgagacggattgggctggagtgcagtggagcgatgttggctcactgcaagctccgcctcccgagttcaagcgattctcctgcctcagcctcctgagtagctaggattacaggcatacaacaccgctcctggctaattttttgtatgtttactagagacgggttttcgccatgttgggcagactggtctcgaactcctgacctcaggtgacccgcctgcctcagcctcccaaagtattgggattacaggcgtgagccaccgcacccggccaactccgaatttttaacctggatttgatgattattcaggaaaatagtatgatcattttggtatactatttaatgtataatcagaatactattgaaatccttgggaaaggaaacatttctatttctgggggtaataaggagtatttggatatacttttaccctaaaatcctggtatagaagagaatactcattccaaaaaaaaatatgcacacctcaaaaggtttaaactttatttaaatgaacaaaaacagataatttcaaattttcgactatttatatgtgaagtggatgatcttcacctaaaagtgacagaggacttccccaacggagccccaaatcaaaaacaaccattttaagacaggcagaaatgacaaaatacataatttttaaaactcctgcttatgcatgaatcatctgcaagataatccacaagagaaaaagataatacttaggtgctgacactcatgtctcttctatttcaaatccctggctgaagaagaaacaaaatgagtcttcttatcaggggagtccagggtccttttagtttcaatttgagattggactggaattttttttttttcttgagacagagtctcgctctgtcacccaggctggagtgcagtggtgcgatctcagcttactgcaacctctgcctcctgggttcaagcaattctcctgcctcagcctccagagtagctgggactacaggcatgtgccaccacgcccagctaattttttgtatttttagtagagatggggtttcatcgtgttagccaggatggtcttgatttcctgacctcataatccgcccgccttggcctcccaaaatgctgggattacgggcatgagccactgcatctggcctggactggatttctgatctgcatttctcaaaggcatatccttgacatcccttctcctaaactcatgctactaactcttcagggctgttctagaggaacgttctagggatacatgcacccttccaacttcatgctatgtaaaagaatggcactagcggtgagtaaattaagaaaatgaataaaactcaattacaatttcacattatataaaattagagggtatacttgaaaacattatgctaattgaataaaccagacaaaagaggacaaatactgtatgattccactaatgcggggtacctagaacagtcaaactcattgaggcagaaatagaaaggtggatggcaagctgttggtgaatgggtacacagttttggttctgcaagacgaaaagagttctggagatggatggtggtgatggccacataacagtgtgaacgtactttcctttgagacggagtctcgctctgtcacccaggctggagtgcaatggcgagatctcggctcactgcaatctccgtctcttgggttcaggagattctcccgcctcagcctcctgagtagctgggattacaggcacctgccacaacgcacggctaatttttgtattttaggtatcaccatgttggccaggctggtttcgaactcccgacctcaggtgatccacccgccttggcctcccaaagtgctgggattacaggcatgagccaccgtgcccggccaatgggaatgtacttaatgccactgagctgttcacctgaaaacagttacaatggccaattttgtgttttacgttagggttttgagaccccaaaaatatgatataatgctcagagttaagtgccatacgatgaactcagagggctatgaagagggaggggtgcaacttaatgaaattctttatgatgaacagttaacaggttatcctagtgctcaaaaggaataccaattgcccgagtatgacgatacatatattatggcaataaaaacattagagggtgtaataataactgctatttgcagggtgcttcataatttgaaaaacgtttctatgtacattagataatctaatcatcacagccacctgggtgggggagggcacatgacttactcttacacccatttctgtgtaagtggcctgtccacagctgagcggatggagtggcttgactgtcatgagaacccaggtgggcttccttccaaacctgcagtgcccacttcactccgccaccctgccttccaataactatgcatatttctgtagaaatacaggaatgttaccaggtgctccaagaaatatgcattctatggccaaagttgggcactccaactccaacagtaacgaaatggatttcactttatttaacctagtgttttctaaactttcttaatcatgaaaactgattttgtaaactgtctattgaaaacctgtgaaagagttagtgtgtcatggtgactaccgcgggaaataatcttaatgaaatgtgctcagttctactcctacagattccatctacttgtaataatcaagtgatcaaggtgtttacttaattggcatttccaaatatcagtgtcatggctggccagctctactctcatctggtattcttccctctctaattgtctgtcttccctcatctaaaactttccatcaaccataaaagtaccacacataatagaccatgaagaaggtaatcactaacgtgacagacgtcatccttggctcctgtacttcttactcaccaagcatggatcagatcagatccaattgagggtgtgtgtgtgtgtgtgtgtgtgtgtgtgtgtgagaaacagagagagagagaaaaaaaaacaatgagagagagagagagagagagagagaaaaacagatggagagagaactgggccatgagaagtataatggtatatatcctccccacctcaaatcccttttcacaggcctgctacaaatgagtcagagaaagaagcaaatatatcactccgtgttaaataaatgttatcggaggagggaggcgtagggcgaacaggaacacaggttcaacaacaatacttagatttggagtttaatatacctcattagcagtttcttcacactaatggaaacaaaaacatcagcaaccacagaccaaaatttctaatcatgggtttcttgtcttgttttgttatgaacacagtgcatccaaaaacctttaagacaaagcaacaatttgttcaaaaataatttataatatgataggcatatttaattattgaaaagacttcaatagctccttctgggattcaattaaaaataaatgcccctcccctatgcctttcgcagccctcctttttaagttgtaaacctggccatgctaccacgtcaccaccttctcccttccatgacatttctgagaaggcattaactgctgacactggcccaggcttcagtggagaaaacactaaacctatcaactgttatttcttgttgggacttgcactgtttgttacgtatgttcaatttataatggagtttgtcagcttattttgtttgaacttgacacaatgggaaaagcccttacgggttaattattaatcttgaaatctgaaacagataatgaacaggtcttgagcaactgtgaaagagacccaacagcattagtcaaaatagggactgttcctagacgacagcagtctcaagccccaaggcacgacgttacccattatgtggtagggagtaagggattcatgcttggggaatgggcttcagagccagacagaatcggcggggattttgcctctgctgcttgaggcccaaatgacagtggaaagtcatttcacatcaccaagcctcggtttcctcactggtaaaatgggaataataagagtacatggaacaatctgttggaaatcacagtccgctgcctgagccacagaagtgatcaataaatggcagcctggaaaaaccaaaggtcggatctttccttacgtctgcatgttgattggtcatcataatctccagtctcctgagctgacagagcttggatgttgtccttgcccaaatctcatattgaaatgtcattcccagtgttggaggtggggcctggtgaaggtgactggatcacgggggaggatttctcatgaatgggttagtaccagccccccttggtactgtctttgcgacagtgggtgagttctcgtgagatctattcatttaaaaatgtgtagcacctccccactcggtatcttgctcctgctcccctgactccacactctggcatgaatggaagtttcctaaggtctccccagaagcagatgccagcatcatgcttcctgtacagaacggtgagccaattaaacctcttttctttataaattacccagtctcaggtatttctttatagcaatgcaagaatggcatgagccataataactggaatttttcaaaaaaaataaacaagtatgggaaatgctctctgaaattagtgcctgaattcacagaatctcattccttattgattacaatgaaaatacacaaactctttcatggccagaggaaggcacaacatagaacagagatgggggcatcctgaacccctcgtcaatgataaacgtcaaggataagaagtgtcaatgcaaaggaccactgacttgtaaagtaataatacatcaattctctagcttcttcacatctttactacaagtttttgcaaaagattattgttgctaaagattaaagtcacagacagttcatcttctaaacgtaagtaactattgttgactaaagatgaaaagaagcaaaaatgtaaggatcttggaaagaacattgccaatggcaaacattatttattgctccagaacttatcagaaaggcacaaagcaaatcagagttaccaaatagagatacggtaaaatgctaattctataatacttagattttaaaagtcacacttttgaggcataatcaaattccagctatctcatggtaggaggtgccagtagtaaaatgtatttgctgctaagttgactcaagaaaggcagcaccaaaaacatggcttatagtagacaacccccagttatgtatgaaagtaacagtaaggatgaaactgcattgtgaattttggagccgagtgagattataagatgtgatcactttttgttaacaaccatacacaacagctattatgaatattcccagtgcttaggacaggggcgagaatggaagttgtatcagctcgaatgcagatgtgctatcctcacgagttctcctggaaggatccagaccacaacaaggccaggaagccagtggcctgtttctagaaggcctaattcctaagaactagattaatacagtggaatttaaaattctacaataaaaaccctgggttcaatttctcattcttctctagattctcttaataacagcccgtaactatggaacacagatgagggtattaaaacaagacaccattgggattctacagcacaaaagaccagacaggaattacattctaggtaaattaatcaaaacatagaataaataggtagttatccatccatgctatctaggtgggattttggcttagagaatgaaaacattattcaacatagaatggaagccaggcacagtggctcacgcctgtaatcccaacactttgggaggcagaagagagtggatcacctgaggtcaggagttcgagacaagcctggccaacatggcgaaaccccctctttactaaaaatataaaaattagctgggcatggtggcacacaactgtaatcccagctactcaggaggctaaggcaggagaattgcttgaacccaggaggcagaggttgcagtgagctgagattgcgtcattgcactccagtctgggcaacaagagtgaaactccatctcaaaataaatagataaatagataaataaataaataaaatatatataatatatataaaatgtgtgtgtatatatacgtgtaataaataaaatatatatgtaacatatataaaatgtgtgtgtatatatgtgtgcgtatatatatatgtgcatatataaaacatatataaaatggagatgtaaatagcctgcaatgctatccagagtcaattttaagttactttttgtttctctaaaattgtattttaatttaaattacagggccagcctgaattctgataagaaattcacttttcctcaggagaaagaaaatgttttcatggcattgttaaaaaatgtatatatctccacttttttaagggttaaaaatcactttaagtaactgtcttatataaaattaaacctttacaacacaaaaagaaaccacttccagtatattagtcttggtaatatgaatatatttaactatcataacttcaaatgcaacatttcaaccttgaatgttttcacattgttttgtttaaaaacaaaacccaaaaagtcttaaggaccttcagattccaacgcaagagcaacacattaatgctgtattaatgaatgctgtctttgacataccgcaacccctcattctcttccacgtaaaaggctctagtgctacaacataattgccaaagtagaagctgttgtgttgtttaagttctaagaatgagctgggcaagaagacatttcttccacttaatgtaatccatgttttcacactaactccaaacgcacaacactacaccacaaaagccaggatgctgcataacggccaagtctgccttcctaaacatctaagagattttcttttcaaggagactacactgcttgcactgctttctgtagaaaaagatgaattatttcacacagattctggtaaagacagtctcaggaaaagatcattatgatgtagactgccattttaataaaattaaaatctatctatattttctggagctattttcctaattgatgttgcttgaagattttaaaatctcctgaaacagcaattgggaggcccattttactggccaatatataattccattagtaaggcagactagcaaagaataatcatatcaatttcctaatcagctgcaaccatgctgaatttgaactggcaaactctgatgtgtaagttgctagctgtgatcttcatatcactaaaacgaacaagataccattctaacaactttacacagacatagtctaggagacattgttctgccatggtcacagtaacaaaaaagtggtataaaatcagttactttataaatactgataatttgcagcaataaggaacaggacattaaaaaaagtaaattttcccataggacacctatgactaggaactcttcctaagagaagccaaagttttaattattcagtttcacaactactgtactgggttacctactctaagaaagaaaaggtgctctacagaggtttcccccacacacaaagaatcagcattaattgagcatgatctctgtcattcacagatctggcagattcattaactcattttaaatgaataaggccaacaggatgcgggaaggtgtggctgattgagttccagggctgtatctcagcttattgatggcaccccattaggaaattgaatacaaagaattggtttttttttcttgtaatgttgtcatatttaaataacttttgaacttaaaccttctggcttacagggcagcattgtcttcatttaattagcatcaaaatgatttataattttcaaaacaaaaaagaactagacctttaaaaaaacaccctcagggaaaaaaatcaccaaaagaaaacaaaaagtggtcgggcatggtggcttacccttgtaatcccagcactttgggaggctgaggcgggtggatcacctgaggtcaggagttcgagaccagcctagccaacatagtgaaaccttgtctctactaaaaatacaaaaattagccaggcgtagcggcatgcacctgtaatcccagctactcaggaggctgaggcaggagaattgcttgaaccctggaggcggaggttgcagtgagccgagatcgcactactgcactccagcctgggcaacagagtgagacgccatctcaaaaaaaagaaaagaaaagagaaagaaaaagcaaatgagatagtgaatatgacatagctctgtcccagggttctactttcaaaagcaacgaaatagaagatgctggcttggtggggcttctgagggctctggccttcatttggctgtgagagctacacacatgttcatatacttcacttactcctctagcaaagaaaaagttctttttccaatttcctcagaaactccaggccaacgtaaaggtttcctatctaagttagtatcagaggcataagaaatggtaaatatagcaaccatgcaaataatgtgtagctagagggaaggaaaacgaagagaaggaagaaaataaaattaaaaagtaaacgacaaaataatcttggaagcttttgtgaaaagggaatcaggatacacagattaaatcccagtctgaagttttgaaatgctctttattcattggaagctatcaggaaaagctgcttttaagaaatccatcttacagcctcaaaattaggggcccagttcaattccactcagccaaacaagtaccgtatgccacaggtaagagcaccgtgctaaaatatcaacgtggttaagattctttttaaaatgtggttgtggttgctgaaaattcaataagacaaaaagaatttttcagtcttagtaaatcctgacaacagattagaatattgtatcattggtatgtcttgaattttttatttttgagaccgagtctcactctatcgcccaggctggagtgcagtgacacacccagtggcatgatctcagctcactgcaacctccgcctcctgggtttaagcgattctcgtgccgcagcctcccaagtagctgggagtacaggtgcccaccaccatgcccggctagtttttgtatttttagtagagatgggttttcaccatgttggccaagctggtctcaaactcctgacctcaaaagatccacccgcctcggcctcccaaagtgctgggattataggcgtgagcccaccacacccagcccattgaatttctaaattcacggaactcctgtctccaataaatatctttcatcacactgctctgtagtaactttatatgtgtacaagagacagacagacaacatttataaaataaatggtaaaaatttaaaatattttgctcaacaaagatgtgcaactagaagtgttcattaggccctcactccactaaaatgctgacttttaaaaaatctacctataaacaatgttttaaattaaatttggagccaacagttttcactgattactttcaatgtggtaaatgagaataaaccatatagaaaattagatgataccgaataagcgattggttctacaactggccaaaaaggctggatctcaggactcagcagcaagggggtagcaaatagattagggaaggagcgatgggcattaactctgaaataaaaataaaaaaaaaaaaaaaacagttcttagcctttttccttctttacaggaccttggatgagaattttaaaacaatctccaaaggttccactgatagctgcccctcacgggggctcacctccttctctctcacccacacctctctttaaaaagctgccctcctagctccctggaaattttatcaacggccagttgctgagagaaaagtgattacgacattttcaaactggggttttaacatgactgaacccctcctgagtcttttaataatttgtatgagaatttgcctggaggcgcagagctacccttctgtgccagtttatgaattctaaacaggcctcattttttcaatttaggcacaaaaacaattctccctaaaacctccaggaaaaaaaaatgtctatggcttatttaacccaatctaactacaagatatactttttttaaaaacgtggtgactggagccagaaggtgtctgctcacgggggtgactgccatggtggtgtcagaagccccaaagggcaagtcccccaggggaggaaccgccagtgtcctcacaatccaggcagagcacaggatggtggcacacaacgagacagaggagcacacttgaaggggtgcctgcaggccaaatcagggacaatttgagtaccaaaataaataacagaatggcctggcaacccaccaagacctcatctctacaaaaaatttaaaaataagccaggcatggtgacatgcacctgtagtcccagctatttaagaggctgaaggaggaggattgctcgagcccaggagtttgaggctgtggtgagttctgattgcaccactgcactctggcttggatgaaagagcaagaccctgtctctaaaaaaaaaaatcaataaataatactactagcagattataacccactgaataaaataggaaactacaagtccatatagagagaaataaaattggaaatctgatgagaaagaagagacttatataatttcaaagtatccccccacaaaacatttactaacatttctttccttcacaaagaggaaaataataacttcacaactgggaaggctggcaatgctgtcttaaccaagtggccaaggtgagtagacagcatcagaagtaggacaggccaacttcgggagcactcagagaacacacaggaggaggacaccctacatcgtggcctgtgatgtgtctgccagtgatgcaacgatccaatgtggagtgaatcgtgagaaaacatctgggcaaaccaaactgaggggcattctacacaacaacttgcctggactcttccaaagtatcaacgttgtaagtccaggaaagactgtgcaactgttcctgactgaaggagtctaaagacacgagacaatcacgggcaaggcatgatcctccactggaaaccttcgccgttttccagcgccccgattgactggcaggaatgggtcagctcatgctgtgactctgacccctgtatggtggctgtatagaacagttgccttgaaaaacactaatgtctttggtaagagccaaagacatttggtactctcgaatgatttagagaaaataaaattcttcatactgcattgcatcgccaacttttctagaagtttgtgtcaatttcaaaacaaaaacaaaatctcaaacccgacggctgatttattcttagttatgtatacaggtgaaaacagatatggataactgatataatggaatgaggcacaaattaccacatcacttattctactaatgtgagaattaatgacaatgtataaaatttgctaattttgtattagaaaaaacaaaaggccctttagccacatgggttaatgtgctcttcttgtcctcaccagagtatccacaccctcagccagcaggttgtgcaaattcagggctttgctctgtcttttcatgccaagccactcttatgaccattaccaaccctctgagtacacggagggctaagaaacacctcctgcatccaagagtcccaggacaccatccagaacacggccagaactaaggaaccaaataggaatccttgtcaggtcttctgctttcaaaggccatgctgtcacagactgaacaaacacatgggttctagtcccggatctaccccggagaactctgtggcagtatcacactgggccttggttttgctatctggaaattggggaggtgggtgcgatcatctaattctgatcaaccccaccagcatttaataaaggtctccccttttgccaggtcctggttctgtcttcaaggagctcaagtctagcaaggaggggcttgcaaacagatgcctctggacaagtgaggggtaaggggagaggggccattatctcattagacggtacaggctccatcctgttcaggaagaagacactggagaggagggaaggttacaggaagatggagaatctcagttgaatttacaagataaaaaatagaggtttccctaagtgaaataaaaggatggggagaagagagccaagttaattcaatcagagtcaatactatacaatgggctgggtgcggcagctcacacctgtaatcctagcattttgggaggccaaggcaggcagatcacttgagaaacgaaatcggaatccctgtcagggttcaagaccagcctgggtaacatggcaaaacctcatctctacaaaaactacaaaaattagttgggcgtggtggtgtgcacctgtagacccagctattcgggaggctaaagtaggaggactgattgagcctaggaggtggaagttgcagtgagctaagatcgcgccactgcactccagcctgggagatggagtgaaatgtcatctcaaaacaaaaaactaaaagctgcacaatggttcgtctgcatgaccttaggcaaggtaggtaacctccgtctcatttcctcgtttgtataaggaagataatggcattatctaactcatccttgggaggagggttaaatgttttcatatattctatatgcctatatattttatatatttaatatttaacctgtaattattaaatcactaatatatggtttatattatatattaattacatataattattttaaacatttcataatttaatctacatttactatattctaaatgcttcagtcgccaggaatgtttactatagtatactctataaaaggacctggcacattgtatgcacgcaataaacgcgtgttgtaatttgttatgatgatattgataatatccattataatttggtgtgattcgggaaggggatgcaatgtgtgtgtgatggaggtgggagggttgcagcaactcgtgcaaccagctaatgccagatgagccagctgccagaggccaacagacgccaggacaaggagtttgaacttgattctgtcaataatgagcgtcattctgttgtagtccctatgtacagcctattgattctcaatttaacaagtttggttatctggtttgacagcctacagcaaactaaaggctgggagttgggggggttagtgctgatgcagaggaggaaacagggatgaaaaatgaagcaactataggaagcaaatgcaattagcttgaaaacttcaccattctgggccttacaagctcaatgacctccacctcaccaaatctctgcacgatataccgatcaattctgtgggagggggaaaaaactgactaaagatcaatttagagtaatttaacatattctgtcaaagacgactagtaacagatgaaaggtttaaaggtcttccaaaattaagctgggtgcggtggcacaacctgtaatcccagcactttgggaggctgaggtggacaaatcacctgtggtcaagagtccaagaccagcgtggccaacatggtaaaaccctgtctctactaaaaatacaaaaattagccgggcacggtggcatgcacctgtaatctcagccactcaggaggctgaggcaggagaatcacttgaacctccaaggctgaggttgcagggagccaagattgcaccactgcattccatcctgggcgacagagtgagactccgtctcaaaactaaataaataaatgaataaaaaaataaaacgaaactcttgcaaaattatttgaaaggtgaaaagcttttaaacttattgggaaaaaaatctttcagcaggaagagtcatgtgcctagaattctagagtcctagaccggagagtctggctggcgtccttctgaaaagtcatgagaatgcttcacaaatgaaaaaaatgaagatgtggcctacaagccctggagagctaggatcagtgagaaactcaggacaaacttaagggcatctctgaagtcagcatagatccctataagaaactatatgaaaaacccaaatctgatttcaactaaaatccatcatgcgtgaccagacattcattctggctctctgagctggatataaagacatcatcaggcaaagaagaaaagtctccagcattttaaaaagtaaaaaacccaaatccccttctttcccatctgtgagaagctcataaccacctaacgcaaaaataagtccagaaatgcaaatcaaatacccagctaccaagtgaagtaaattgcacagctaatgtcttcctaatagatacacttcaccttaagattaagtttaaatacccaacagtggcagagatgctaaatcaattcctttttcacctgggaagtaaggaaatgtacatttccaggcccatcacagctatgtgggggccacacgcctgagttcaggccagtgaaatgtgggtgcaaggaatgatggccacttccagaccctgccccagtcacgtccctggaaggcctccaagctctatctctagtattccctgcacaccaaatgcagagaagccaggtgaggattctgagagcttagaaccaactagatagaggaagcttgggtccttgtatgaccacatggcgagagagaaagcagtcccctcccacagccagccagctttggcctgtgacataggcagtaagtaaacctataaatccatgaagccactgaaattccgggttgtgcgttacaagagtcagccaccctgggtgaaaaatggccttgggttaacgaacttctgtgagaatcttctaggtagtcacaaagctaccaaaaccactccaataaagtctgggaaatttacccccatggaggttaaactaatttcacagacttacaaccgggacacacctgattcctaaaaatccaggtcactcgctgcctttcagacgcagaaggtaaccactccctgatggaaaacgctacctactgcatttccttctactaccaatttggtgaccccaaaatgacaaagcagacaagttagaaaagtgctcttgttagcgtagccaaaaaccctaaaggaaaggttacacaatgcaggatgagagaagaaggatggcactaacaaccgtcattgaggaaaatcatgtaaggcaggatgtcaaaatgtttatttctacagcaaagcatactttgcattttcggatatttacatttagctcagtgactcgtgcaatgcaatcctctgacaaagggccgcattccaatttttcttaagagaaaatagagtgcaaacttgtcttagcaagtcagcaacacctgcattggcttggcaggactctctcacgatatgtaaataatgaactgccaataagctcgttccagaacaaaggagaagaaatttgattcctctccctgatgtctctgccatcaggaaatggtttttttgtttgtttgttttgtttttttttttgtcaaatttggaggaatattgtcaaaattgctaactcaaggaggaacaaagaccctccaaaggggagcaggagggcctggattgggctgccagtttcctaaaaaggggatggacttcagtttgggaacaattcatattactaagaaattgtcttctctaagacattacccaatgaaagactaaagctttaaacatttaagtcaaatcatttcaaatatgcccaccatgggttccagggattatggcccaaacagaatggaaggtgatttatcatcacccttgtccaaataatttcctgaagaccatctgacacctgggtctaagcaaaaatgccaaaacagctccatttctgccacattggaatgtatcaagtgtgtgatgagcagtccatgaattgagggggagaagaggattctctacatctcctcactagcctatttatgcctggtacttacttctacaaaagtctctagtacccacttcttcacatggactgagcagtgattgagaatttaacctctgcggccagaaagacaatgagaggtgtgatagttaatactgagtgtcaacttgattggattgagggatgcaaaatattgttctgggtgcgtctgtgagggtgttgccaaaggagattaacatttgagtcagtggactgggagaggcagacccaccctcaatctgggtgggcatcatctaatcagctgccagcacggccagaataaaagcaggcagaagaacatggaggggactagactggctaagtcttctggcctccatctttctcccatgctggatgcttcctgcccttgaacatcagactccaagttcctcagcttttggactcttggacttacaccagtgatttgccaggggctcttgggccttcggccacagactgaaggatgcactgttggcttccctgcttttgaggcttggggactcgaactggcttcctggctcctcagcttgcagaaagcctgttgagggacttcaccttgtgacagtgtgagtcaattctcccaataaactccccttcatatatacatctattctattatttctgtccctctagagaaccctaatataagggagttaaccacattaaacatcagtttttcatccatatatgaggttcctaataatgaccccctcccaggtgagccatgagagttaagcacataatactggtcttggaagggaaacaatataacaggtgagttagcgtcattagtatacgcagcatgtagtggcagatcccttacagatcatgggaacatgaggaataatgagatttcaggagttctaaaaaagaccctccttgttcacaaaacactttccctaaccaaaaatttcactgtttgatttttaaattatttctcttcttaagaaacatacatacacccaaaaggaaaaaaatctgagccttatccgtatgaaggtgttttcactgaatccatccataataatagggtcactttacaatgagcaaactgaggcttggagaggtcaactatatggcccaagttctcgaaagtagctgagtagaaattccaacgcaggtccacttgctcttaagttcatgctcctttcccggaggattctgctagatacagtaactgcattctccctaagggaaggtttttatagccagacagaatgacgggaagaaaagaaaaaagaatatgaaaataggaaaaaaggcgaatgaaagaggttaggttatgatacagaaatgtgtgccagggggcatccttttaacaaaggtcaagccctctgagacatagctcagcaatcttctccagcccacatcacacacaacccttaaattacggcagctactcacctgcctggtgcaaaaagaatgtttctgtgcatagtgtgtccaatatattatttaataagatacgacaagcccaaacattcttcttgcaaattgttcagagtggtgcagaagccaagttttcatgcgtaattttcttttctaagaatgtgaatacatttatttgcagcagacatttgcttttagtatacttaataatcctggaaattcagtatgtttctttccttaaaaatcaacatgatacctacaaaaagtacttccggagggggatgggggtgaggaggagtacaccaggaaaattgtttagctctttgtgtgttttttttccactacatttactttaataacaaatccttgcagttgagtttcaatgttattctgagtcttctgggaggctcccatctgggttccaaataatcaccatttgcaacatttgtaggtgaacagactgttggttcacaatatagagaaaagaaagattgttcttttaatgtcattcatgatatgtgggggcaaaataatttattaaaaaattcaggagttcaatagagcacactttattttttttgagacagtcttgctctgttgctcaggctgccatccagtggcgcaatcttggctcaccgcaacctccacctcccaggttcaaccgattctcctgcctcagcctcccaagtaactgggatttgcaagcatgcacctccacacccagctaattttttgtactttcagtagagacgcggtttcaccatgttggccaggctgatctcaaactcctgacctcaagtaatctgtccgcctcggcctcccaaagtgctgggattacaggcatgagccactgtgctcagcacacttttttaaaaaagattaaacagatgcttttgaaacaaggccagagtgcccattcacttagttaatgcagtcagaatggacaacttaacagattctcagaaatcctaatgggagtgtaagatgtgattcctgcatggtagacaaacagtacaactgctactaagaagaacaatgtttatggaagaattacgctatgaattttacatataaaagctcattcagtcttcccaacaatccagagagaaaaatatcattattatcaggaccatttctcacttacaaatgagaaaagtgaggccaaggaggagaagtctcccacatgaaatggttaactagtggccaatcacactgacccttggcaaggatatattttttttaagttttactatcacagaaaatcagaacattcagcagatttaagctcactgatattagaggtatcctgagaataactgtggataaatgatgattggcagtaggatatattatataaaatgttagtaagcccactaaactctttgaccctacctatgaagaagaaaaagggccaacatagtcaaagcatttaatgaaaagaaagcaaatatttctttaaattgctcccactgccctaaatatatagtaaaacaagctgcacatacatcagtttttcttaaacagggacccatatttttatttctcaaccccagtacacacacataatagcttggtttactttttatcctattccaatatatttttttagaaatattggctgcaaaccactaaaattattttataaactcccaaaaggtttcaaccctcagttgaaaagcgctacccagacggaaattacaattttgcacacggagctatttgtatttttaaaacgtgcatgcttgtaaagggtaggggtcacacagacttgctaatttcagcgcttctgcataggccctgggaatggacccaggacaaggatgcttagcacacgatccctggaggactttcaaaggtatctgaaccttctggaattgagtgtaaaaattatgtgcagggacgtacctgcatttgtataaagagcagttccatggcttctaccagctttataaaggtggggtccatccaagtttcacgtatttatttatttaactactttaattttttggtgagagtcgccaaacctcgcaccaaaaccacattttggttaaatataaataaaatcaacatgcaatgaggctgggcgtggtggctcactgtaatcccagcactttggaaggccatggcggatggatcacctgaagtcaagagttggagaccagactgaccaacatggtgaaactccatctctactaaatacaaaaaagtagctgcgcatggccgggcgcagtggctcacgcctgtaatcccagcactttgggaggccgaagcgggcagatcacgaggtcaggagatcgagaccatcctggctaacacggtgaaaccccttctctactaaaaatacaaaaaaattatccaggcatggtggcgggcgcctgtagtcccagctactcgggaggctgaggcaggagaatggcgtgaacccgggaggcggagcttgcagtgagccaagatcacgccaccgcactctagcctgggcaacagagcaagactccctctcaaaaaaaaaaagtagccgggtgtggtggcgcatacctgtaatcccaactacttgggagactgaggcaggagaatcacttgaaccagggaggcggaggttgtaagtgagccaacatagcgcccctgcactcctccagcctgggcaacaagagcaaaactccatctcaaaaaaaaaaaaaaaaaaaaggacaggcgcagtggctcactactgtaatcccagcactttgggaggccgaggcaggcggatcatgaggtcaggagattgaggccatcctggccaacagggtgaaaccccgtctctactaaaaatacaaaaaggcgggtgtggtggtgcacgcctgtaatcccagctattcaggaggctgaggcaggagaatcacttgaacctgggaggcggacgttgcagtgagccgagatcgcgccactgcactccagtctgggagacagagcgagactcggtctcaaaaaataaacctgcgatgaaaggagatcatcaaccatgatgaccctgaaattgtgtcacaaaaatacggccgactgtcaataaccttcactcatttcttctacatattgagtgcctaccaagggtgatccactgtattaagattctgggttaaactggaaaaggaggaagttaaatgagaggtaccctgatgtcctctgcagtgttctagtataattacactacaattctgaaatccacaaaattgaagattgtcacctagctgtttcctgcctcccacagagaagctgccagaatgctctgaaagaggatgagtttaaaccaaaaatcgtatcgttttatcactgcttgttcccaattaacagccaaaatatttcaaggaaaggtttataccgattgagacaatggtgacatgtagccaccctcagatgaaaaggcatgagcatttttcataaaggagagtattttgtgagggctaaatcaaaaactgcattcccacttgaaagaccattaaaacactaacagtgcattcttctcctcaccctatggctgggaaacaataagctctgtcgctaagaagtaatcaggactgtgtggtttgacccttatcggatctaaggtgttctgagccaagataggattgtgtgatgggcatgcctatgcctcttgtttccttccacatcaaggattcgcaactacagcaaacttcctggcctctctgagccctcaggatggctctgggaaggtgagtcattgatgtcaacagaggagagagtttgggagaatgacccacacatgcctagataaaacccttctatttcacttgcttaggaatccaggcctctggggaagtcaaggttggaccaccgtggatcgtgaggtaactggaaagatcctgccccccagggagggaggcctgttatccagtgccaggtctgcctaggtgggtaagtctacctaactcaaatggccagggatgtccaggaaacctacgttgctgtacctctgagtcacaacctcaaatcctatatttaccgataataaagctgagcttttggtctccacttgctgaaccctttgtttgtctcagttggtccagaaattaagcaggaaaaagagcttctcaaatccccgtaagctctgtcctctccatcttctcaatttcaagtggattgacgacacttaaaacactgcttggccgggcatggtggctcaagcctgtactcccagcactttgggaggccgaagagggtggatcacctgaggtcaggagtttgagaccagcctgaccaacatggaaaaacaccgtctctactaaaaatacaaaattagccgggcgtggtggcacatgcttgtcatcccagctacgcgggaggctgaggaggagaattgcttgaactcgggaggcggaggttgtggtgagccaagatcgcgccattgtactccagcctgggtaacaagagtgaaactccatctcaaaaaaacaaaaaacaaaaaccaaacaaacataaaacactgcttggtcgggcacggcggctcacgcctgtaatcccagcactttgggaggccgaagtgggtggatgacctgaggtcaagagtttgagactaccctggccaacacagtgaaacccagtctctactataaacacgaaaatcagccaggcatggcagcacgcacttatagtcccagctacttgggaagctgaggcagaagaatccctagaacccaggaggcagagggtgtagtgagccgacatcacaccactacattccaacctgggcaacagagtgagactctgcctcaaaaaaaaccccaaaaaacaaacaaacaagaaaaaccccaccactgcttaactcatctgtgactttccaattttaggacaaaagtacatgtgcctacttgatgagacaactataggtcttattcatattctcaggcagccccaacacagcagagaagttcctagaaatcaaaacataactaatgacccagctcaacaggatttcaaaatgaagatatttttctttaggttactgcacaatcacagagtaacagcagctttgcagagtgagttaaacagtaatttgggtacagctcccaggtctttgcagaaagaggatcaaattcttttttattttttgagacggtctcagtctgtcacccaggtgggaatgcagtggcaccatctcagctcactgcaacttctgcctcccaggctcaagtgattctcccacccaaggttcctgagtagctgggaccacaggcacatgccaccacacccggctatgttttgtatttttcatagagacaggagaaagggtttcaccatgttggccacgctggtttcgaactcctgagctcaagtgatctgcctgcctcagcctcccaaagtgctgggattacaggcgtgagccaccgtgcccagccacaggataaaattctgtcattcaaagtgaatttccaaaataacaaatatcaagggtgagtgtcccaagacattcccacagcctaataaaatccaggatgaattatcaacaatttggtagttagtcaagagactctactctgtatatagagcatccaagaacccaaaacctactggttcctacttagattttctatttatgcatctgattagcaaaatctgtcaattttatcatggtaaagccaacaaaatttactactttggaaatagttctttttggctttgagtctgggaggggaaaaaatggaaagagttctgcatataaatcttcctgatgttattttgtctttatcttgataatgttactagaaagataaaatctgattcagcctggtttctcattcaggatgcttcctccataacacaacattacaagatgcccttcgagttggtggtttttgtttttgttgttttatacaaagacagggtctcgctctgtccctcaggctggagtgcagtagcgcaatcacagctcactgcaacctcgaactcctacactcctgagaccctcctgctccagcctcccagctggctacaattacaggcctataccaccatgcccagctaaacctctgagttttgaatcaaatttttttgtgtctccagcacatcacaattgggcctcagtttctactcatttggcttcccatcatgaagtacagcataaaggttgccaggccttttgtttctggagctttactttctgctgtgcaacaagctaaacacccagacagtgactaaccagccttgagaagggtgaactgataaaaaaaaaaatacatgttccaaagctgctcaactggtgtacaagtgcatagttgagtccccgttttcaattcttttgggcatatacgtggaagtggaattgtggggtcacatagtaattctatgtttaacatttggaggaagcagtaaattctttttcacagtagctgtgctattttatgttcccaccaacaatgcacaagggttcgaatttctccacattccttccaatactttattattttccattaaaaaaattactataacctggccgggcacggtggctcatacctgtaatcccagcactttgggaggccaagacgggtggatcatgaggtcaggagatcgagaccattctggctaacacagtgaaaccccgtctgtactaaaaatacaaaaaaaagtagtcgggcatggtggcgggcacctgtggtcccagctactcgggaggctgaggcaggagaatggcatgaacccgggaggcggagcttgcagtgagccgagatcgcaccaccacactccagcctgggtgacagagtgagactctatctcaaaaaaaaaaaaaaaaaaaaaaattactataacctttctagtgagcataaggtggtacctcaccatggttttgatttgcaatcccctacagatattgagcatcttttcatgtgctaatttggctatgtgtatattttctttggagaagtgtctatccaagtcctatgcttattttttaaattacatgttttgttgttgttgctgagttgtttcatcactgtttatagcagcattattcacaatagccaaaaaactgaaacaacccaaatgctcatttacagaggaataaacaaaacatatgtatatatacacctatgcttacatgtatataaacatatatataaaagatacatatatatatcatcaacccaaaacaggaatgaaattctgacacatactacaacatgaatgaaccttaaaaacacgatgctaagtatgatgtatgattccacttagacgaggtacctggaataggcaaattcataaacagaaagtagaatggaggttaccggggcagggaggtggaggatgagaaatgggagctattgcttgctgggtacatattctgtttgggatgatgaaaaagttctagaattagatcatggtaatggttgtgcaattgttcacttaaaaatggctacagtggtaaattttattatagatattttatcaaatgcaaaaaattcactttacacttctgaatatcattagtcaaaaaaaatccacaacattacaaaaaataatggctttggtcaatgatggttgagtctgaggtctccaaggcaggaatgagccagaaaatggcattcagggtatgtggtatcagaagcttaggtcaaccccagctgcacactgaccagtgagcaatggtaggtgactccctctacctctcagagcctcgctaaatgtggaattgaaaaaaaggagagttgggctgggcgcggcggctcacgcctgtaatcccagcactttgggaggccgaagcaggcggatcacttgatgccacaagtttgagaccagcctggccaacatggtgaaacccatctccactaaaaacacaataattagccagcgtggtggcacacacctgtaatcccagctacttgagaggctgaggctgcaaaattgcttgaacctgggaggtggaggctgcagtgagctgagatcacaccattgcactccagcctgggtgacagagtgactctgtctcaaaaaaaaaaaagagatctgggtacagtggtgtgcacctgttgtcccagctacttgggaggctgaggcaagaggatcacctgagtccaggagtttgaggctacagtgagctatgattgtgctaccgcgctccagcctgggccacagaaagaagggggcggggggggatgacctgagagttataggacaggtagaggaaattccctatgtgctcagtgcagggactggccgaagaagccattcagcatcggcaggcctgcacctctgcctcggactcaggctcctccacataatctgaggccggtccacactgccttctcagagtacgttatttcccatgctctactgtttgtttgtttgtttgtttgtttgtttgtttttgagacggagtttcgctcttgttgcccaggctggagtgcaatggcgcgatcttggctcactgcaacctccgcctcctgggctcaagcgattctccttcctcagcctccagggtagctgggattataggcacgtgccaccatacccagctaatattgtatttttagtagagatggggttttgtcatgttggccagctggtctcaaactcctgacctcaggtgatccacctgcctcggcctcccaaagtgttgggattacaggcgtgagccaccacacccagcctcttctgtgttttaaaaatagttcaggacagaattttaaaagcaagtaaaaattgctccttataacataagaagccaaactgattgaaactttaacccttcttgacagccttcaaaaaccatctcaggccgggcacggtggctcacacctgtaatcccagcactttgggaggtggacagatcacctgaggtcaggagttcaagaccagcctggccaaaatggtgaaaccccatctctactaaaaatacaaaaattagccaggtacggtggtgggcacctgtaatcccagctactcgggaggctgaggcacaagaatcacttgaacttgggaggcagaagtggcagtgagccaagatcgtgccacctgcatgagactccatatcaaaacaaacaaacaaacaaaaaaacaaaaaaaccaactcagcagagaaagaaataaaaatctagaaagaaatcatctaaataggaatagtgaatacctttgatagttttgattgccatctttttgcttagccatatattctagtgttcctataatgaatatgcatgattatctaagaatatcatatgcaaaaaggaaagaaaatactagcttggagtccagcttctcccaagtctccttgctccttcttctcctcctggaccacagtcttccctctcactctgtgtgttgcatctgcctcataatgatggggaggacaattctagctcgtattcacaaaggtgtacctgtggagagcactcctctaagtcatgacacacgtaaattcatgtcctactcacgatacctctatgggtgggggggggtgccatcatctgccatcttataggggaaggaactgaagcctggagaatgacagcaacttgccccctgggcaccctgctcgcctgtgacagccctggcttcaaacccacactgaatcctgaacccagtctcttggcctcaacaacctggcccctcctgtgggtgtttctacttttgccactgcctgtctctgtgtcacgatgcattgacttttctgtcacctccgccacactgtgaagcaggggctgtggccctacccgaaacagctaacccacagtctgtccactgaattgagttatggctgaatattaggtcccaaacgcaatgacattttaaacctatctacacatgcaattgtatttctatttccacaagggggtcaagcaaccactggtcacttcagccaggcggggcccacttcatggttttcccacagaactcccgcaggtgagacaaagcgcccctcagggaactcggttccttggtggagtccatggtagaacgctgtaggtgcacttcagggctccacagccaaagtaaagaaagatgagaggccgggcgcagtggctcacgcctgtaatcccagcattttgggaggctgaggcatgtggatcatgaggtcaagagatcgagaccatcctggccaacatggtgaaaccctgtctctactaaaaatacaaaaattagcaggtcatggtggtgcccgcctgtagtcccagctactcgggaggctgaggcaggagaattgcttgaacccgggaggcggagcttgcagtgagccaagatcacgccactgtactccagcctgggcaacagagcgagactttgattcaaaaaaaaaaaaaagaaagaaagtgcatgaagccataaaaaaagtggtgctaaaccagtctgaaaagactacacattgtaggattccaagtatatgacgttccagaaaaaacaaaactatttagagacatcagtggtaggccaggcgcagtggctcatgcctgtaatcccagccactttgggaggccaacgtgggcgaatcacttcagccctggagttcaagaccaacctggcaccatctctataaaaaatttaaaaattaggctgggtgtgatggctcatgcctgtaaccccagcactttgggaggccgaggcgggtggatcacctgaggtcaggagtttgagaccagcctggccaacatgacaaaaccccgtctctactaaaaataaaaaaattagctgggtatggtggtgcgggcctgtaatcccagctacttgggaggctaaggcaggagaatcgctagagcccgggaggcagaggttgcagtgagccgggatcgcgccattgcactccagtctgggtgacagagtgggactctgtctccaaaaagaaacacacaaaaatttaaaaattagctgggtgtggtggtgtgtgcttgtagtcccagctactcaggtggctgaggtgggaggatcactggaacccaggagttcaaggctacagtgagctatgatcacaccacttcattccagcctgggcaacggagcaagaccctgtctcaaaaaaaaaaaaaaaaatcagtgacttcctggaattagcaagaaaagggaagaattggtggagcacagaggattttagggcagtgaaactattctgaatgatactgtaatggtgggtacagtaatggccgcttgacccccttaaaaacagaacaatgactgcgtgcgtggaaaagtttaattcattgcgtttgggacccaacattcaacaataactcaattcagtggacagactgtgggtggatactgtaaaggagaatcacttgaacctgggaggcggaggttgcagtgagcttagatggcaccactgcactccagcctgggcgacggagagaaactctgtctcaaaaaaaaaattttatttggtgcctgcttatgggcagagggatgctgtccatgatggtgataacaacagtaatagtaattgacacttgtagaggacctactgtaagtcagacgctgaagaagtttcttaattttctgacaattctatcaggaaagtacttgtccccatttataaatgaagaatccaaagcacagagaactcaggcaacttatccaaggccacacagcctgtaagtgatggagctagtgatttttattcccacagtgctgctctcagccatcttttctgcctgtaacctttcagacagctgcctctagcctacctctgaattctaggattccatccacagggcccctaacattgccaaaagcaaagagattaactgcccaactagaatatgtgacattcaggctggagacaaagattttggcttgatttggtttccaaacaacaaaatcatttctttaagtatttcaaaaatgtttaagaaatattttggtaatgtttccctgtactgcccccaaagtacagggaaatggtgaatacctactccataccagcatccctcagtaggaccacaagggtaaacaatgagtacaccaacactgtaataaccaaaggaaagaacagaagtatttttttacaggccaggcacggtggctcacacctgtaatcccagcactttgggaggccgaggcaggcagatcacttgagcccaggagttcgagaccagcctggacaacatggcaagaccccatctctacaaaaaaaaaatacaaaaattagccaggaatggtggtgtgcagccgtagtcccacctactcaggaggcagaggtaggaagaccacttgagcctaggaggtggaggtgcggtaagctgtgatcaatcatgccactgcactctagcctgggtgacagagggaggccctgtctcaaaaaaaaaaaaaaattagtttttagtttcatactactagagaagaatcatggaaagatacattctcatagagtatgtttttagaatttactcagaaggggccaggtgcagtggctcatgcctataatcccagcactttgggatgccgaggcaggtggatcacttgaggtcaggagttcgagaccagcctggccaacacggcaaaaccctgtctttactaaaaataaaataattagccaggtgtagtggcgctcacctgtaatcccagctactcgggaagctgaggcatgagaaacacttgaacccgggatgcagaggttgcagtgagccaagatggcaccactgcactccagcctgggcgacagagcaagactctgactcaaaaaaaaaaaaaaagaatgtatacagaagaaggttcatctaaaataacataaatattcatcatgtatctggggaaatatagatacatttctaccttttaagtcaaaaagctggaaagaaaccagccatcagtgagttaagaggtgtcacacggagggggcattgaagaacccacacttttcaatatttttcccctttactgtttactttcacatgcaactgcgaataaaagcagtagatatactacacactggcatttagaaattgtttaaaatggagctaaagacattacatttaaaattgaagaagagcatccctttgcaaaccaaccgtgtttctcacgccctccagaccctccagaccctgctgaggcctctgcttttccactgtcaggcagagtccccctggagcaaaactgctgtgcatctgaacaccctgaccccagcgagaccccaactcccctcccgcaggtgagccactgaattcctcacctattaatgacatgtcctgattttgtttggttttgttctgttccatttttcttatagaatgccccattctctaggaatggagttgagcagctgccactctgtcctctgatcaaagttatggtcctctcctgtcttcctgttgtcccagctcacctgagagactttctgggaagagactcttagagggaaggggagtactatggcattcatggagaatccccagtgaccagcttggaaggcagctgaaattttcaaaggaacttcctgcctatctgtatcccaaactaaaaagatagaaagaaaaccaaacagctttaccagttaacaataccatccttcagtgcacaccatcagactccaaataatccatattaagtggtaaaagcccatgaactggaaagaaagaaggcttctgcaatgacaacaacaaaaagatagggcaagtccctagtatctcagggtattccccacgccctgcagatgtgcgtgatcatacacttcccaccaggtaatactcgggaagtatttaagatgctagatgaaaggcatttgttacccaggggcaatccccctaagtttcttgcagtggtgattaaagcgattgccctccatcccttccctaccttccagtgatgtgaggtttaactaatgtgcacttggggttttaagatccctagatgaaaagaggaccagatgtgaaagttattattattttgttcaaagtagacgggtatactaacatctgtgggcaagtttaccacacgccacttaaaacaggctaacagggtcatatgccaaaacgttcaggtttgcatttttgaaaagctcagagatctgacagatgtgttccggccgcgatttaacatgcggctccagtgagaaggaagcagatatgacaaatggttcacttatttcagaactaaaaccccagaggagcagcctgagccaaaaagggaagtgatcaatggaaaagacggtcgaatctgctcacaggcaaggcaagggggcaacacagagcatgtgcagggaggaggagctttctgtttggaaggtaaatgaaacactgggctgcagagaacccgaaattatcttcaagcattttttagccacgcttgaactcattctagaattcatcagctaagtacccttataggataaaaagtccctttcttcatcttctataaagaaagagatctgtgggctgggcgcagtggctcatgcctgtaatctcaacactttgggaggctgaggtgggcagatcatttgaggtcaggagttcgagaccaatctggccaacatagcaaaacccatctctactaaaaatagaaaaaattagcctggtgtggtgatgcacacctgtgatcccagctacttgggaggctgaggcatgagaatcgcttgaacccaggagaggcagaggttgcagtgagctgagatgtgccactgcactccagcctgggcaacagagtgaaacgccgccatctcaaaaaaaaaaaaaaaaaaaggaaagaaaagaaaacagaaaagaagaaaaaagatttgtgcctagagaaattgcaaaaataaagaccaccccaccatcaccctgcaccagtaggatccagactgtgtgagcaataagaaagtctaatcgatgcccaaacacaggcttactgagaaccatggtccacatgaaatggtgcgtagtctcctcccaacgcagctgtcagggagaacctatggacctaaaccagatcgtgtctccctagtcctatccacaaccctcaaaggcttcccatctcaccagcagtcccgcagaccctgccctgacgaccctcctctgtcttcatctccttggctctcccactttgctctttccacccaaacttccaacatgcccagcccagccctctgccctctgcctcgatgctccctctgtcagcacagggctcgcttcctcaaccccttgccatcttggctccaatgtcacccatgcagtggggccttcctaactcccctatgttcaaaagctcaaacacccaacacttccttgcttcaagggcctccactgtaacaatcaccttcccacatggtacatgttgtaactacagtcgccattccctatccacgggttcagtatccatggcttccatatctgtggactcaaccaaccgtagatcaaaaatattcaaaataaatcaagaaatgattgtgcctgtacttaacacgtacatattttattttattttttgagacaaggtgtcactctgtcgcccaggctggaaagcagcagcacaatcacggctcactgcagcctcagcttcctaggctcacatgatcctcccacctcagcctcctgagtagctgggaacacaggcacacggcaccacgactggcttattattattttttttttttattttgctctaagttctgggatacatgtgcagaacgtgcaggttggttacacaggtatacatgtgccatggtggtttgctgcaccgatcaacccgtcatctaggttttaaggcccgcatgcattaggtatttgtcctaatgctctccctccccttgacccccaccccccgacaggcccaggtgtgtgatgctcccctccctgtgtccatgtgttctcattgatcagctcccacttatgagtgataacctgtggtgaatttttctattttttgtagagatggggtctcgctatgttgctcagactggtctcgaactcccaggctcaagtgatattcctgccttggcctcccaaagtgctggaattacaggtgtgagctaccatacccagcccagacattttttcttgtcatcattccctaaacaatacagtataacaactattacctagcatttattttgttttaggtatccggagatgatttcaaatgtgtggaaggatgtgcctaaattatatgcaaatgctatgccattttccaaaagagattaagcatctatggattttggtgtcctcagggcagggaggggatgtcctggaacgaaccccccacaaatacgcagggacaacatctcttgatattgtctgtatccagaatgtcagttccctgagggtaaggatgcttcccagccttctgccctattgtctccttactacctgcaactgagcacgtgaacgcagtgaacacacagatgctgacttcaaaagtcaaagacaacccgcaagaagaaacgctgaggtcggctcccagaaaaatcctcgtaactgctcactttcgtgctaaggtgcctgtgcacacagtcctgacgactccttgtgggaagggtgataagactgaggcaggatttgagcatttctggtccccaggtcacagtacattcaaatacgaccaaatccctgctgtccgtaaccacccttgatgcaggaaagtgtggctaacacggcatctaccatatgaatcagctcaccagaaaatgcatccttagtgtccacagcgcagcacatggccagaaggaagaaaacaggaacatgaagtcagtgctttcacagctatgaagccgccagggaaaatcccattcttagagtatcagagcctcctgcttgatgagggattctcccctgctgcccagtgactgctgcccaagccgacaggctgcaaagaacttcaagaagtactataggtcaaaagacactttactagatgtcatgagtagaatgcagtgctgtgtctcctcaatttggtttgaatgttgttgctgtttcataataccattttatagagcagtttaaggttcacagcaaaattacgcagaaagcacagagatttcccatatacctcctgccccacacgcacagcctcccgactaccaagatctttcaacagaatggtctgtttgttgcaatcaataaacatatattgacacatcattattacccaaagtccatagttcacattagggttcagtcttggagctgtagattccatggctttggatgaatgtataatgacatgtatctaccatcacagtctcatacagagtagtttcaccaccctgggagcaccagtcctgtgtgccctgcctgttcatccctctctcctccctagcccctggcaaccaccttgatggttcttccatgttctttcatgactagctcatttcttttcagtgctgaataatattccattatctggatgtaccacagtttatacattcacttactgaagggcatcttggtcgtttccaagtttccaataaacctgccataaacatccgtgtgcagagttgtttttggttttttgcatggttctttgtattttttgtttgtttttgtttttcttttttgggggacagagtttccctctgtagcccaggctggagtacagtggtgcaatctcagctcactgcaacctccccatcccaggctcaagtgattctcatgccttagcctcccaagtagctgggattacaggcatgcgccaccacgcctggctaatttttgtatttttgtggagttggggtttcaccatgttggccaggctggtctcgaactcctgacctcaagtgatctacctgcctcagcctcccaaggttctctgtatgtttttaatagcagtttggtgtggggagacacaccgaaagagaaatgcaaagaatgaccttagtgagttagagacaaaatagacttcatactctccaagaaagtccctctttctaagaacacttttgagaagttaaatttggcaaagaattctagtgttagttttatatacacatgcatccatttctaatactatgattttttttcaagcacttcagatggatttataaactcggaaaggtaaaatgtgatttgaacattttcttttgtccctattaaataaacatgtccgtggaacttcgctgtagattccattatacttaggctatgttttcccaactggtactaccagcccacgtgttctctgagggatccactgttgtgacatacagagccagtgctaaaaaaaacaaaaatgctgggttgaatgcatttcaaagattcaaccaagtagtcaacgaagatgatgacaaactgtaaaacaaagatgcctacaaatttctggacacaggagtagaaatgaattatgaaagtaagcatccatcccaccaattatgtctcaaaatccatatataattattaaactgaagttgcaaaactgtaggcatctcaaggcagataggttcatcctttggaaaaggggagctcaccacatcaaacacagcctgcaggcccataggcccaaccagccacaatgactcccaggggaaaaatgaggaaggaggatgtcccagaacccaaacgtgtcttaaatgttattccaaaagaaactacttctcaactatctctaaaatccaaatgcattcctggtaggacagagcctaccctaccacactcctgaggactgggaatctccggctatgccacaccagcttgaaacatccaaccaaaaggcatttgaccaggccttccattggacagcactactttcctactgagggctgacattctgcagataaatttcccaaatcctgtatttaccactctaagtattcctgggcactcacacccactgccatttgtgagtcagaaagagggctggcaaggaagcctggtggatacacagacagaggtcacagaatgagggtcccacatgcaggatttcagtctgatttcaaacgatggaaataagaggcaggcaactcacatttcaataccaacttcatgtgctcttgagaaaagggaaatattgaacattcagatcagctttttgctttcttttaactacaaggtcccagcgaaaacataatccgtgtctaacatatccaattactgagaaaaagcacgtacatgctcctgtgttctcttcacctggctagtaacaaaatggtatattttcccattttatttaatttttctgctctcaaaattacttccagatcctattttttctttagttttcattttcatcctacatgaaaccccctactcctggagtaaaaaggaaagaaagaaaaggaaacaaccacaagttaacacggtattttaaaatacaacaccaaaaatataaaatccagccacggcatctgagactgaaagaaacaaataaataatgtgtaaataaataatgcagcactatcaagctaaaagttgagtcttggtacataatatccatattacaggctttgccaactatacagagagaaatttctatacactcaaggaacctaaggatgcaactcacagccctgagcaacaggctcaactaaggttgaagagtcaggaagagcccaggataagaactttggtctcctgacctctttctagcccagtgctcaccttctcatatttcatattaatgaaatactaactagcaaataatgataatcattttgtttaaacatacatgactgagcttaccagaaataccctcactcacctcactcaaaaaaacttttttttttttcaccaaaagagaaaaaccactgtgccctgagcaggaaccatttctagcagtatcaacactgccactggaaccacccagagaaaatgctcaaaccaccaccagggaactcgcgataaaacacccacactcacattcacactatgtatgtgatcattaaaatcaccctccaatgatctacaaaaaaaaaaaaagtctgttggttagagctcttcatgactaaatggctcatcagacatctgcccaaactagattcctctaaatattgagaaaggtgaagcagaaacactaagagtccacattggttttctgtcccaactcttaaaaagaactaaataaaccaggcatggtgatgtatgactgcagtcccagccactcaggaggctgaggcaggaggattgcttgaggtcaggatttcaaggccagcctgggcaacatggcaagaccccatctctcaaaagcaatttttattttaaataaataaatgaattaaagattgtagatgcactgttcactacttgagctaccaacacagggaaatcaggaccacagaggctagggtttctcagctgccccgagggctgaggatctgggtaggtgtggtttgtccgcctgggggctgctgagcctagtccaggcactttacttctctccaactccgtttttttcagcagtaaaactggaatattaacagctcattggattactttgaagattaaatgtcctgactcttcaaatttatcaaacttctagtttatacctctcatttgaacccttctaaacttctagtttatacctctcatttgaacccttctatgaactctctttttgttttttcttttgcgacagggtctggctccgtctcccaggccggagtgcagtggcgcaaacatggctcactgcagcctcaaccttctgggctcaagcaatcctcccgcctcagcttcctgcgtagctgggaccacagacatgcaccaccacaccctggctaagttttttattttcttgtaaagatgagccctcactttattgcccaggctggtctcgaatctctaggctcaagtgatcttcccacttcagcctcccaaagtgctgggactatgggcatgggccatcacgcctggcctgaacacttatgaattcttgatggtatatcttttcttcccttctacactgtaagctacgctgtaccccaaagatgatattctacactgtatcccaaagatgatattcatagctacccaacaaatgatttgttgaaagaatgaataaatgagctaaccataccaccctcccccccaaaaaattaatatgaagcatagtaactagatgtcactctcctaacctgaatacattaccttaccttggcttgttgagacttctgcaaatacattagaaagataaatagcaacagttactacgtagaggtgaaaatcggaaacgcttccaatcaacgcttatggctataggcttttccacttcgattcaaccccacgcttggtttgcatgcaggcaattgcaacagcccctagtgttccattctaaagctgaaaccacgaaaaatccattttattttcacttaatgtcaactcttgtgctttctttgaagagggattctgctgcctccagccctccccacctgggtgctgtttctttattatccccacctccccgcctttttttttttttgacttgggatctcactctgttgcccaggcttgagtgcaatggcgtggttctgactcactgcagcctcaaagtccttggctcaagggattctccccctgctcagcctccggaatcgatgggattttatgcaggaaacactgcactcggctgttcttcatcaatgcttcagtcctcattacacatattgatgctgtttgatcagcaaaaaaatcccactgataagggcacctaactgcgctatcttgactctccggggatttcagataccctcacctgcgcctccagtaaagctaacccaggcctctggaaagaatttttttctagctctgaaagtagttatctgcagcccatccctcccttcacagcccccacatggttcattcccatccccataagcaaaccgaactctgctgagcatcagttcggagcagagagaaaaggctgtgtgctttgagcagactggctccttcccaagctaaacacacttatgtgcatctgactccattaccgccccagcctgcacatgtaccagggcgcccagcctttccggaggtgagcttgtgtttacccactgccatgggagtatttcccagtcagcctctcctccccacagtggagactggctgcaaccacccgacccccaacccaggcaaccaaatgtgacatccaaggagttcccggagtggccatctgtccctgccatgccaatgtttacgcgacatgggcaggagaaggacaggccagggaagcctccagggtatcttgcatcagacccaaggcatccacatcccaggccgtttgtgccacaaaacaaaaacagtgaaagaagagtcctctgtctaaccagagaggttcccggttcctaaagagaagcatccatctctttaactttcctgagggtgttcaaagaaccagcctgatacgtttcacctgtggaccaacatctaaaaataaaatgagatccctaattttgcagtttttaaaatattacctcaccctccccaccctccacaaagtgaaacctaaacatggtatttcagacaataatgacttcaacaagctcatgaacagtgaaatgctaggaggaattggctaatgtagaaaagatttagatcagaaataaactcaagccaggtgcggtggctcatgcttgtaatcccgggaggccaaggcaggtggatcacctgaggtcaggagttcaagaccatcctggccaacacggtgaaaccctgtctctattaaaaatacaaaaattagctgggcatggtggtgcacacctgtaatcccagctacttgggaggctgaggtgggagaattgcttgaacctgggaggcggaggttgcagtgagccgagatcacaccactgcactccagcctgggtgacagagcgagactctgtctccaaaaaaaaagaaaaaagaaagaaactcaagagtctccaaattctagagttaatatgaccattagacatgctcatctaaatgtctctgtttatattcacaaccggaggtcaagatgtgtgggaacagtcacgagtttagaaatcagataacacacagttcaactccagggtcactgccacaatagagtgattttagtcaagctacctaggttccaccaagtagacttggagatgagaatacgcacaggctcagaggggctgtgaggtgcaatcatgtattctgttagagatcacaaagcagaagtatgccaggcacacagtaggtgctcaatgtttgcatcttcctttccagccctagccctccttccatagccttacaatgtcgggggcgcacccaggaggcagaagatgtccaagacagaataagtgaagacagacgccactggggagcgttcggccggccatcagctaagactcagcgcactgactctgctgggacatatttctgttatctttcgaatggggacaaaagatgcttgacatgtttcacctaccatttgcatgaaatctgttgaactacatctgaagtactgggggagaatccacattattcatcacataaatgtgcttaaactccctccggggggaagatgggctagccactgtgcctgaagccaagagatgacacatccattctatgactcaacttgagcagctgcagtgtgaaaatacacacacaggctcacacagaaatgggctaacaatttttagaattgccccttgctttttttttttttttttttttagttttgctctttaacctcattactttcctttgctcacagaacctggaagcaacgttgacatttctttggacagctctgaccgggttttaatcccaaaaagaatcccttaacactgtggcacatgaggcacagggcacagtcacaggtctcagggactcatgatcctacttcagggagagctcagaagggtaacatcatctgagaaggaacactggttccgaggggcaaaaatcacagtggctggggcagtccagaaagacagccgggaggaggtggacttgaactgactctgaaggagaggtaaaatctgaatcggcagagagcaggcaggaggccaatgggggtaaccaacaaggacaggtgccctgagacaggactcaggaaagctgactctggcgggctgtgtggccactcgttcagctaacatttactaggcacgccatggcagtcactatagccatgctggggcaagtataaagagaatccaagcaacccaccctggaggaacacacaatagcacggtgatcaagagactagactccataggccaggctgcctggttcaaatcctggtacctcactttccaatgctattgctttgaataggttacttaggccagaggtgagaagtcatgtatacgtttttgattaggaagtgttttcagagaaaaccagaaagtaggtaggggagatcttgaagggaaggaagccctgggggcactctagacccagggcaagataagacctcagccttggcctggaatatgtgcacccttctcagggttagcccttgctagggatgccctgggggtatagagactaccaggtagttggccaaagggaatccagcccctaaaggcaccctccaccaaagacagcaggagcgaaagcactcagggagagggaatttactagacaggtgaaggggacccaaagggataggggctgaacatggacagccggtgctccaaagggttaataattgttgtttttattattattattgttgttattattattattattattattattattttgagacagagtcttgctctattgcccaggctggagtgcggtagtgtgatctcagttcactgcaacctccacctcctgggttcaagcaattctcccgcctcagcctcccgcgtagctgagattacaggtatgtgccaccacaccgggctaatttttgtattttagtagagacagggtttcaccatgttggctagactggctcggactcttgacctcaagtaatccgcccacctcggcctccctaactgctgggattacgggtgtgagccaccacacccggcctattattatttatatgattatttttaccccttgaaaaaggcatgtagcctaattatgataatacaatgtgtctgtattatcacagggaaagtgagtgctttggctccgctctctgttggagggtgcccttagggactggattccctttaaccaactacctgggagtccctgtacccccagggcatccctagcaagggctaaccctgaggagggtgcacatattccaggtcaacccggaggttttatctgctccgtgtccagacagcccttgaaagaaaggtttctccaagccactgtgtacatgcggagaaaggagtggctacgctgctgtgcgtctggatgcaggcagagcggagcagcaggtaagactggaggaacaagtcacggcaagatctgcaaagcaggacccggaatgcagggtgggaaactctaaaagttacaggaatcatgcattcctcaggaagcacctgtgattcttgccctctctcaagtccacagtctcctattgtgttcaatttctggaccaaccaacataggagcccaacctggtaaaggttaaataatgcatcccgatgtcacctgctaacaaggtcgaggtgcgtttgtccacgagaggaaggcaaagttgaaaagaacaagagcaacttcacatagctagaaagccccttttggtctacgtcattctcctcctaggaagtaaacggggactgcatgggctaacgtgaccgttcccacttagaagggaaactgaagtacccacagccctttctgctggaattccctagaaggggtctgtgccacatacaggaagtagggagggtgtctttgcagcatatttcttctcttggagttaactgcgaacgttgcacggcgacctcttgatccattctgtgaaagccccaagcctgtcatgcaataaagacgtccagtttcaccgcagcagggaggccgcatgaaatattccacttgaacaaaaccacttagcagtttacatcaatgcttaccctgtcgcattgaaagtgatgtgaacccacacccaagagcccccaaaccagcacgttgataccaagtttccccagctgcatccaaatcaattccttcttcccctttcctagtatcatgggggcagacaaaagagaagtcagaaagacagaggattacccgcagccaactccaaaataaaataaccatgggaaccacccaggaagaatgggaaaggttcccaggaaacccatttcaaagcctcagattgcaagtggggagactcagcaaccctttaaccaccaaaacaatcgtcacaaacaatgaactttctattgtcccaaaaaaggtggatttgggcaggatcaagataataaagactttaaaagcttcaatcctcattccccagccttttgcaaacgccacacttaccccattggaaacagaagaggctttgtcaagatctccaaatgggccatctgcagggactgctcacatactaggtgagagactaggattcagagcattatgcccatggtaccaaccagcctcctcttcctcctcctgggcttcaggtctagaaaggtgggtctcagtccacagtgattctacctataagagcaacataagaaaataatgggttttgtgcttcgtttttacatacctctagagattgcaagattatcctcagaaacattaacgtgataacacaggaaaagtaccttacatgttgtagacactcaatacattagagtatggatattttgataagcagttcgtattttaataaagaagcatttaccaggcttagttatctatagctttgtagaaagcaccttgactgtagagattcttgcccaccaaaatctcatagttaatggaaacactgaagcatgtggctgcaaggtactagaggaagctctacgattcagtacaagagctcacaaatcaatccaccctgaatcattcaagaaacaaaactttccaaaagtgatgatctcttccctaaaagtgttaccaatgaaagccatgctaacacttgttttcaagcaacggcatcaaaataaactggagaagtgggtgttgcaaaatactcatgaaaacgacgcctccttgttctccattctcatgaaagcattggctagaacaaaatagcaccactgggtcatagtgggcaggccagaccaggtgcagctagtcaatctgtcttcattgaaaataactccacacttgaagctgattcactacccaaaatgtaaaccaagactcactccttgagcaaagcagaactttagcatagcaccataaagcaaatgaagccttttcccagctcacaatccctttccatccccagtccagtcccttgcaatactagatgcataaataaatgctaagtaattatgccattacataggacaaggtccttataccctaggaccttgtcaactgagagaccctaagaagaaccaatggctcagggttgggcaaactcaataacgctacattcccttgtcggggaatattaaccagccaagctcctctgtcctatgctcttattgtccctttttggttacagcatcaaccataatatcaaacaatcaacacttcccccaaaagtgcttagaaactccaaggtctgaaaaagtactccaaggtctgtggcacgaaactgctatggcagtcaccagcatcgtctatcttcacgtttaattcttttcctgttttaatttaatttttagagagggggtctcactatgttgcccaggacagcctcaaactcctgggctcaagcaaccctcccgtctcagcctcctgagtagccgggactacaggcacacaccgccatgaccagcttccaagttaaattcttgagtaactaaatttaacacactttgccttcatagaagcaacccactaacttacatctcagtcgctgccaagtttcgggctttgtactcatttcatttttacactaaaggcaggcaaaaaaaaaggaaagaaaaaaacaacagagcagagcagtgggtaagatccttaggagatgagacaaactgagaggaaaaaaaaaaaccaacactgggaaagtaagataaaaattggagggaagaaatggtaagataatcaactaggaaaacaagataaaaatactgaaaatatggaacttgcccataatgaagagagaacaaatgggggaagtggtttttgttttattctacggcagtaacttcaccttccttcaccttccattgagagaagtggaaaggttggaggtaggacaagaaagggtaggaggcagaaaatactaatcgttacactgaaaacactaagtgtcactattaaatgcctactttgtgccaaacaaaggatagaaaccttacacgaatattcataatgaaatctcattatacgctgaattcacagtgcaatttcacaatcagtttccagatcacatttggggaaatacaagttcagagaggttaggcaattttcctgaggccacacagtcaaaaggggcagagcaagaattcaaagccaggtctttctgactccagcatcctttctgatatacttagaaagaatctgttctgagaaaactttaaaatgctcagactcatgcattaaatatgaaccaaaatgaagtgtcttctccagtcattacagcaaatttgttctgctgtcgtacaaggtaaatctgtattgtcaagtgggttgaaagtacctacaattcactttaaattaccagtaagtcttatgtaaattctagttacatttttccagaacaatatcacagggtgtgcctcaattaatacacaaaacccaccttggaacaatttggtccactgtgtgtggtgttcacaaacagaaagtatattttaataaaactgaaaaaacataatctatgtcaaacatacaaagacaaatacatggtgtcctcctacttgcagctaacgaactcagttgctaattttcaaaggctgtttaaggcctttttcgacagagttccactgggcagaattttaaaaatgaatataaactcaagaaaggaggtggcctttgtttgtgttccaattaagataccatcaaaaatcgaagttggttcttccaaaagaccaataaaattgataatacattagcaagactgatggggaaaaggtacaaataacgccatgaatgaaaaaggaaacatatctacagatactacagtctttaaaaatattatgaggacagcatgttcaatattataccaattttaaattgtacataaaatgggaaaatttctgtaaaaattaggtattaaaacaaacaattttaatgatctagtatctattaaacaaatttacaatttaaaaacagtcagataaggtggcacatgcctatagtcctagctatacaggaggttggggcgggaggatcacttgagcccaggagctccagtccagcctgggcaacagagcaagactccatctctaaaaagaagaaataagtgaataaaatttaaaaatataaccaaccagagacaaaccagcttatttactgggagaggtggggagacaatatgaaaagataatgatacagaaattgccactttctctcacatctacacggtcatatactagcattaaccccaatttcaaatgtcctcatgatggtatcttccaacagtcacatgtgacaatatctaaaaacctttgctctatgaacaatgcagttcccctttttgtagctaagaattattgttccataaaactccgtctattagtcagtttcaccagcattatcatgagatccaatttggttgtctttcctgttgagtgagttactaaaggttccttgtggggtggaggggcgtgagggagtagatcacagacctcatgtcagcatcaatttcacatctacctgctgctgggtcctttcttgagctcaaaatgagctagaactcagggctctagccctggatcatgcaacctgttgttcttccctaagccatgtctgatttggtttaaaagtaatttcctctccatctgtatctttaacttcaaggaagtgggagagtcagagcaagctaagcaaactgcggccccagcaacctgcctcccgacccccaaagttcaagggaaggtatgctgagagagtctgccaattccgcttcgatataagaaaaatgataaaatcagctactgacattttcctgattgtacccaccccagacctgggaaagaacatttggcttgctataaatacaacaggagccacacatttttcaccttcatttcttcccctcaaagtaagatgattctgtaaacattctcatgaaggattcgcttacaaaaaaacaaaaaccagctccagctgctggtgtactattaagttgttgatcaggtatgaaacaagtgcaacaggtaacagttaacccaatagcctccctctgacccctacacactgagcaaaagctacacaggccaaatggaagcccagtgaccagctccagacttgaaataaaacctaaatcctgtctgtgagaagcctcatttgagctaagtttatcctttgctgggacatactgccacttgcaatgatcccagcccccagcaccaccttccacccaaacttcctctcacaaaattgacttaggcaatcgatccaaaggtaagctagctttcacagaaagacagacatttaaaaaaatgatccagataaacaaatcacacctccacagccaggaacctagagtcgaactaatttaatcagatgtaaaattaatgagaaccccgagacttccgacgtcccactccagaactcccatccaggtgcggtcgggagccacagcttctgaatattccttcggaacttttttctcacttgattcccaagcctgtcatggggttctttttcaatggcactgacctgcaattacccaacgagcagcgggacagccccgggcaggacgcatcctgggtgggtgacgtgatcccgcagtctcctccccgaccccatatcccatacaatgatcctcgcttacagaagtcaagggggaaagatgacgctttcaaagcccgaatctctttaccctggagccagaaccagcgtcgccgccgtcccctgcagctcagccggcaacgcgcgccgagcctcggggcgcagcttggagacgcgcttgctcgttctgggaaggggcacgggacgcacggttccccggccccagctgcacagctcagctcggggctctcacctatcctcgttcagagccacattcggctgcctcccctgaccacccgacacaaagagattcgccggtggaaagaatcgatttcaaaattcaagctcaccgctgctcaacaaggcgcgcacgtttctccccgtctggcttcacatgtcccaaacttccagtaacagaaatgaggaagcagcagccttccccggctgctggcggaggcagtgggtgtaacttgtgaagtttcgtgctatgatgaatctggtcacttgggtgtgttggagagggttggtcgctcctcccttcctcctcccaccatcacctccctcctctccgcctccctctccaatttaattcttccctctggcattcgccggctgtcactcagaatcccagcaccctccccaccacatccttgggggcaatgtatttcgaaaaggtcttaaccattttacggatgaacctggtcaccctgcacaaagcgtgagtgcttgtcaaataattttctacagcacgtggcaaaaaagcagcgcctcttaaaagatataaaaggccagcaatgttacataagcgccccccaccagcccttcaaggacagaaacgtgggtagttcattcagtggagacctaactcccaaacatctattgaaaaggagtgaagggcagaaaaacagaaaccaaactttcagttggctgccttttctttcatatgtactagaaagtatttccaatatacaacatatatttgaaaagaatataatgaacacccacgtgcccaccatgtagcataaaaaaattaaaattactcacatagtggaaactatctgtcaacctcttcctcgctgaaatacatccctctttccttccccctggaaagaaaactgccccaaatttgatttcccatgagcaatttttatatcagtttctaaaaatgtgaaagggaacatgctaacttaaagtttaccagaaagccatgcaatgaacatccctctgctgtgcttgaccttggtttccaaacagaagtttctttaaataaaactttaaatgacctcaggttaaatgatgcctcaggtggctggttaaagagaatgaaagaaatcacaaaagaagaaaacggtaaatctgaagtgacaagtgagaggctatatctgaaagggttgaagcattcatggatgaaattgatagattaatagagtattatcattttataaggttaaaagctgtgccaaaaactaaggatactcatccatactgcaagggactttcctcaaagacacaggctacaaaaataaaaacccaacattcattaaagaagtcataatgactcaaatgccagccagggatgcagcctggaaacagtactctaaaaagggaactttcagaaacatttaaacttgactcaaatatatatgtatatatatccatatatatattttatatatattcatatatatccacacggattcacacatatatatattcatatgtatatgaacatgaagaaagagatggctggttcatctttacattcttggtaaagaatataggctggtataaaggctggtatagcagaaaatttaataaccacctgataaatgaattaagcaaataaacaaaagagtacccacaaacacatctaaaggaacagaatgggcacggtggctcacgcctataatcccagcacttcggaaggctgaggcaggtggatcacctgaggtcagaagtttgagaccaggctggaaacacggtgaaaccccgtctctactaaaaatacaaaaattagccaggcacggtggtgtgtgcctgtaattccagctactcaggaggctgaggcatgagaattgcttgaacctgggaggtggaggttgcagtgagccaagatcacaccactgcacttccagcctgggtgacggagtgagactctgtcttgaaaataaataaataaacagaatgaagaaagagaagaatgtttggatacagcaatggtccttagttggaggtgaatttgcctccggggaacatttggcaatatctggaggcatttttggttgtcacagctgggggttgctactgatatctagtaggtagagtccagagatgctgctctacatcctatcatgcatataacaggcccccacgacaaagaattatccagccacaaatgccaatagtgctgctgctgctgagaaaccctgatttagaagtttcactatcacctgtcatttaattaatgtattccatctattccatatagcatcatcaatttgaagagactctccagggacttagaaaaacatgaaacaacacttctccttttccactgtgcagcattcaatcgctgagaaccatacatatgggctcagaagaaagcagacactgagatcagaggcaggaaagcatcccgtggttttgggtgcagccttggcatccatgcactcaccaagctactgacttacgctgaatctggatgaaaacaatcatgaaggggatgggagaaggatgatgtaaagccaggcgggactgtcttgagaatcagagatcgcgtacttcggggaagccgacatggtgtgcagcgagagatgtgacagatactgagacaaagcagccccatcgaggcccatcagtcatttctccattgacaattatgagtctccgctggaactactccacacacaacaggaaggcgcttcatctcattacagcatatagaaaagaatgttacaaatcactcgtgggaagaggaaggcaagcaccatgaagtcagtggtcagagcatcagagcagtgggcttacacggggagcacatcttgcctacaggttttctggtctcatgattacctaagaaggtttcttttagctctgggtgggtggggggcatatacttttttttcaccttctttctgatattattatttaattttgcatggagggggagaagagctttttgttgttacttagtgtttctctaaaggggacgtgggggaacagtaggtttgctcatcttgaattttcttaaagccacatatatggtggggacgcaatacatacatgttggattaaaccaaatagtccccaccttcttccctatctctcaggcctaaaaataaagggtcccctgtagatgcttctagagaagaataacttgagatcaagagtctgagcaacatgtgaacacgttacataaaccctgctggctccatacagtggcgggcaggttttcacagatctgaacagaacggcttacctgatagtgatgaaaatacagcaatatcagaactggagaggccccaggcattggccttgggcctcggagggaagcaggacttagcatccaagaatttactgctatagcagaagggctgtgtcctcctgcccaggaagattcccccacaacactagtagacaagtgggcagtaaggaagacgcctatccctctaaaggtaccagtttcttaacctgcagttctgaaagccactcgttttgctttttaagtcatgcgaatttcggaaaagaaaatgtgaacgcaggtccgagccccatcagcagcaatgaacttatacacaaatgtacagtatttctgctccaaagaaatgcaaccagtagagggagcacagctgacttttgttgttaatttctcaagatcgggatgaacctgggaatgacgctaaatgatacaaaaataacacacatcaccgcaaaagaaaagatgcatgcacggacgttcagagaaactgcaaaccctgacacccttatgcacgaacgttcagagaaactgcaaaccctgacaactttatgcacgaacgttcagagaaactgcaaaccctgacacccttaggaggtatgtgaattgttagtggatatttgcacaagagctggctaaacagacagaagaggactacataaaaaataaattcatgttggaaaacaatatgtggcatgtggagaaaaggtcacaaagggttaaacttctttttccctttgtcaagtggatttacactcagaaatgaaaacgtatggagagtttatttaagcatattctctccaaaaattttaactcaagtgtttagcttgctcactctctctctctatatattagatctacaatagctgggctttaaaattcctttcaaattgcattctcagtgacagagatgacttccaaaagcaagcattttctggattgctcttcaggggtctccagaaccaacttggtcaggaatcaaggtgtcttcaagatctgcgaatttgaagccatcagccacaatggagcttacctccaccttttcaagccttcatagaacaaaaacaaggtaagaagtgctggcaccaacgcgtcctcacctatgtcacctagcaacaatgttatcagcagcaaggccagggaagagtctcctcctcctcctcgtgttaggtgatacgcaacaggggtgtcaacaccgtcaaattacctgaatccaaacacgatttcccagcataactgcagttccaaatatgcatcctgttaatggaatccatatttggactgctatggaaatgcagaaggtttttcataactacattttgtggttgactaccaacggattgccaaaatcaattttttatatttgaaactgatgaaaggtctaaatatggatccatcccacacactcccatgctaggtaatctgagggtctgcttgggaatacggacatgtttgaaaacactgcaaacacttgtttcagccctggatggggtctttctattctctgagagacaaacaaggttcacctttctaggcaaagttttaaaacacagtcttcattaaatttgatttgatacaagaatgttttacaacttcaaagtaaaccttatgccaaccaaacttagagactctttacatagttttctctatctgaaaacagaatacctaacaaatacatagagatattcttaaaaaatacagggccagccaaaaagaggccaggaaactctaatagcttttaaacaccacctccagaatgcattgcagggactgtgtggcaaattccctaaaatccaagggcttcaatttcctttactataaaatgatgaatgttcgatttaattttctctgccttctgagctctatcttccaattataagtttccatgattttaaagcccccattgttttcattaccccaaattagatttccttacagaagaacaactttcatctaacaagtcaaagtcaacagggtcaggactccttggtagcccacattcttctaagtgaagccaggtttgtaactgaaagggtgaagggaaaagggaggaagtgcaaccagagttagataaagataacaaagaaggccaaggaaacatccgtgagctcttagctcccaccagcaataaaccatatggggccagatgctgtcccacccacacacacagtaaggcttttgatttcaagggccctgggtgccttgcacaaatggtgcatgtgttcacggggggtaaaagcatcgaagtttttcctagtttgggacctttcagatacctccctgctcggcagcaataaacaataataattgttattggcactagaagtaagataatatagaataactaagaagacaaaaagtcaagttctaatttcagtcctgccatttcttcaaagaatgccaggatagctttataatccccagtatagcctcttgaaaaagctgggtcagggagtatcccatcggggaggcctcattgggtcatgagagaagcaaggatacaaaatgagaagagccggttcaagtccagggtccagcgacaaccagaagagtaactcagagcaagtccctctgcctacccttcggtaaagtgggaacttaaaataatagatgcctattggcaatggaatgcatgggttaacaggctttggactgggcacatgcccaacactgtctctaaatgggcgaatgggcactaaacatgtcaagacaattttcaatcaggaaataagccaaccctgtttcttaaacgatcttagcatttataatgttctcaatgttttcacattgacggtgctattttggcaaaaagtacagttctggcactagttacgtgtcagataacagaatggaggtccttcccaatggggtcacagagggctcaccctcttgagccctaagccttccccagagagtccctactgtggggaagtagcaggccacccttgtgagggtggacgcagtgagccacaaaggcccgacactaaccaggtccaaccaatttaatggtatttaatggtattcatgggtgggaatcattttgatttttattttatactaagatacagtaactgtcactttaaaattttggggggccaaaacatactggggcagggagtggagaatgacgctggctaagaaggtgatatagtttggatatctgtacccacccaaatctcatgctgaattgtaatttttggtgttgcagatggggcctggtgggaggtgattagatcatgggggtggatttctcatgtagagttgagcaccatccccttggtgctgttctcgtgatagtgagtcagttctcgcaagatctggttgtataaaagtttgtggcatctccccgcatctctcttttgctcctgctctggcacgtgacatgtctgctcctgcttctctttctgccataactgtaagttttctgaggtctccccagaagccaagcagatgccagcatcatgcttcctgtacagcctgcagaaccatgagccaattaaacctcttttctttataaattacccagtgtcaggtatttctttatagcaatgcaagaatggcccaatacacgatgagacatctagcacaggggtaggatggtgaagtgaaaaggaccccacctatagacctgcttgtaacacatgacaccttacagagttttgtactaaccacaggcacaaaatcaattaaaattaggtgacttgtaatgaataatggctagggaaacgtgttgatgagaatccacttgtcttgtgttcccttccactaacataggcatttgatttcactctaggaatacttgctgccatcttccctaatgtaaatgaaaaccaaacatgtacaagttactttcaatcagagaatacgacaaacctgtatctcaaaatattaaagggtctaacataggggtgacacatttagggtcatagacctctatatgtaagagaagaaaggaggtcttataaatcactcattcatctgaagtcagaaggagtaagtgacttgttcaagctcacataataaaaccatgacagcttcagcccagtacccaggtcaacagaaataaacttgctgtatgttccactcaattattacctcctttaaaaaatatgtccataaaatgaacattcaatgcagtgtatgcacatataatttgggggctccaacctagtacaaaaggcacatacaaataaaaaacaatataaattgagcccatctagaattaataagcaaaccataaaaagtgggtacatgagaaattcttggctaagctccagacaagcaagcaaggggcccagagacctgggagggaggacgcagtcaaacccggatggctggaggcagtctgactcaccagcagccagcgtcctcccaaacaaattacagaggcaggctcagcaagaatgcaggggaaagatccacatgtgcccaaggggttaagatagcaacctggtcaaagatacagacttcctcagttaggaaagctctacccctggaataccaagaaattaaagttcatctctggcagggcgtggtggctcatgcctataatcctagcactttgggaggccgaggagggcagatcacctgaggtcaggagttcaaggccagcctggccaacacggcgaaaccccatctctactaaaaacacaaaaattagccgggtgtggtggtgtgtgcctgtactcccagctacttaggaggctgaggcaggagaatcgcttgaacccaggaggcagaggttgcagtaagccaggatcacaccactgtactccaacctaggcaacagagcaagagtctgtctcaaaaaaaaaaaaaaagtgcatctttgctaacgccacaaaataccgtcattttcacttgtctgtgaatattcattgcagcattactcacaatagccaagaggtgaaaacaatctatgtgcccatcagatgaatgaataaacaaaatgtggtatatctctgcaatggaatattactcagccatttaaatattgaagttctgatctgtgctgctacatggatgaaccttcaaaatattatgctaagtgaaagaagtcagacacaaaaggacaaatattgcataattccacttacacccaagttttggacatagatagtggtgatggttgtacaacattgtgaatgtaattaatgccaatgaagtgtgtacttaaaaatagttaaaatgccaacttttatgttatatatatcttaccacaacttttaaaaaagattccaaaaatatcattttcaacgttttggctcacatatatgtagctttaaaaaaaaaaaaaaaaaagctgctggcctggtacagtggctcatgcctaaaatcccagcactttgggaagccgaggtgggcggatcacttgaggtcaggagttcaagaccagcctggccaacacaatgaaacctcatctctacttaaaaataaatagataaataaataaataaataaatattagccagggatggtaacgcacacctgtaatctcagctatttgggtggctgaggcacaagaatagcttgaacctgggaggcgaaggttgcagtgagctgtaatcatgccactgcactgtagcctgggcaaaagattaagactctgtctcaaaaaaaaaaaaaaaagttgctgctaaaaacaaaagtaatcaaaactttacacacattaaccaagccttccaataagccaactcttcctgtcatatcaccatgatcttcacacgcccagataagtgattttctctgattgtaagagataaaatgacattgcctcacctatcaaggtaaatctttcacaattatgaagataaaacaaggcacacccttgcacagtatgctggaggcacagcagtagggaacagctgcttccaccaacccatcccaaccccaaatttcaacgcatatcaagaaaccaaaaagggtcagatatgagtccaaaaccctaacagtgggggaaatgaatcaaacccaaattcttaattgtaaatattaaatgttacacatgttaactgaccacattcaggtgtaccctcaactcgcagtaatttcagcagttaagacgtaagcaggggtgccaggcagtctaagtgagaattgcgggtcagccaggaattcctcttccagtcacaggcctatcccttaatcttcataaagcctcagtccctcatctgtaaaatgggaataagagcatttccctcataaaactatgtgaagacaactttgatgacaatgagttgctgacatttcctgagcactttctctgtgaaagccactaggctaggggctgctcattcaattttctacctggtcctcatgacagctcagcaaggtactacttattactagacccatttaacagataaagaaaactgaggcacggagaggttaaatgaactgcccaaagccactcaacaagtaagaggcaggtctaaaattctaacctagtctctgtgaggctgggaccccagctctctccaacctcactactgcatttgggctacaatcttgtcattaacaaccttgacatccttacatttgatttatttgtttttatttatttatttatttatctttttttttttttttttttttgagacagagtctcactctgttgcccaggctggagtgcagtggagtgatttcagctcactgcaacctctgcctcctgggttcaagcgattctgtgtctcagactcccaagtagctggaattacaggtgcccgccaacaagcccagctaatttgtgtatttttagtagagatgggatttcaccatgttggccaggctggtctcgaacacccgacctcacacaatctgcccacctcggcctcccaaagtgctggattataggtgtgagccaccatgcccggccttattattactaatattaccctttgtatcatgaatctcagtttctgggttcacaaagtcagagggctgagtgtgattcccaaagcctacacttactcatggagaacctcatgccctcttaaggacaaatgtggcaggcaagcaacatattttagggtttgtcatgaagctcctggaagttaattgtcactccgtctgagaaaggtgagtgaacaaggtatctaacgtgagccagctcaattgcacaagaggcaaataatatgcataatgcatgtgtgggagattcctaaatgtattcctggggccctttcacagaaccaaggaccccccctccacacccccaccacacgaagaggcaagttcaaactctggactgagataattaacggctggtggatattttacactgacctatttataatacctccctgaagtactaatgttggttcacaatcaaaagaaatacatactgaacagaatcttgctcgcagctgaaccacccaacttcccggtaaaacatgcatgacaggtgactcacaaggatgacacagttcctggcacaggcaccaagagttactaccggtgtggaggaggctcagccagcaagttgacaaacacttcaccacatcacctaaaacaccaaagttcaaccctatgctctcagatgcctggtttctgagaaagggaatttctcagaatgggaccacaacgctgacaacctgcccagctgacaatccttgctgtgggctggcagacgccaagataagtcatctctgacttttatttttctcagcctcaacaacttcacacaccttgcttaggctcaggcttatgattcagacttctcacccctcccaaagccctgtaccctgggagcctttgttctttttctggccacagatgaactcagcccattaaagaagagctgtaatcccttacacatataactttccattggcaaaaattagtcaggtcggctgggtctgaggtcagcagtctcctgcagaaacacccaccagacactgttcccccaccaccaaaaaaaaaaaaaaaaggtagcggctaatgaactgcccattaaccgtctggtagaaacacacacacagatactactgactcattccatttcaataaccaaaaacaatattcttggcctttggcatgaatatgggtttttgttttcttaaggatagtggccaccttggtctatttgctcccgtgcaaacttgttcatcttccgcttatgaaggtaaccttagacttgaggtctttgttcaacatcaccttctcaatgaaggtgtcctcctggccagtggccccaccccaccacctccacccctcatccctggcacatttcctttcttacttccctgatttatttttctctcctttattatttatttatttatttatttatttatttatttatttattgagaaagagtctcgccctgttgctcaggctggagtgcagtgatgtgatctcggctcactgcaacctccacatcccaggttcaagcaatgctcttgcctccgcctcctgagtagctgggactacaggcgcgtgccaccacactgggctaatttttgtatttttagtagagacagggttttgtcatgttggccaggctggtctcaaactgctggactcaagtgatctgcccgcctcggcttcccaaagtgctgggattcaggcgtgagcactgcgcgcccggctatttttctctcctttgtacacatgctgaatattttcttattttactctttttcttgtttctctcctccactagaacataagccccacaagagcaggcacttttatccattttgctcacagttctattgcaagtgcctagaagagggcttcatacgtggtagactctcaacaaatattgcatgatttgaataacggtcattcattaccccgagatgataattcaagacaagaagcatgatcaaaaccacccaggtctgaggtctcttctttaaccatagaaaaaaagtccttttaaccaattccttctgaatccttaacagcaaagaaagaaataaggaacaataggagaaatagacatttatgtcaataatacacaaacacttggagttttcaacttatacattcactaaggatgttcaagacactgcatgccaaatctctgaaatacacagattattaataataaagggtaaagataccaattgcccgtatgccatcattgtcatgcatcccccccacagctcacacctcccatcttttcagaccactcaatctcatactctgttagggtctgaatgtttgtgtcccctcaaaattcatatgttgaaatcctaacccccaaagtgatggtattctaaggtgggggcctttgggagaggattagatcatgagatcggagcccccaggattgggattagtgctcttttaaaaagaggtctcggagttcattcatctctttcactgtgtaaggacatagccacaaggcgctgtccagaggaagcagcccctcactaaacactcaatctgctgttgcctagatcttagacttctcagcctccagactgtgaaatacatttctgttgtttataaattatccagtctgtggtattctgttatagcagcaccaatggaataagacacactccaagaatcccttcatagcttcgatatttcatgctcctccttaagaaatgtagattccatctgggcgcagtggctcaggcctgtaatcttagcactttgggacactgagacaggaggatggggcttgagcccatgggttcgagaccaggctgggcaacacagcaagagcccatctttaaaaaataaatgaatgaataaacatttttaaaatttttaaaagagaagtgtagattccatcatctgtcattaatttccctccctcaactccctggcccatcttttacttggtcatatccttttggcaaaaacatctggttaaatccatcagactgcccagttcacacctgtacccagacagctgactgtggctagagaaaacagaagaaagcatgcaaacatgttggctggtctcactttaaattcctgacccctaatgtcaagtgtccccttaaatgccactggcaatcacaccaaaattctctgtctattccctcacccacactcacgaagtttatgtcttctgctttccttccagattcccaacaatttcttcccatctgatgaccttttgttctacttctctgagaaaaatgaagcaatcagagaggactaccacaaacttctaagactatatatattctctggtgatctatctgcatgcaggtatatacactctacctttctgcctgttgatgtagacaactatccatactcctctctaaagccaacccctccacttgtgatgaggtccaatctccaccccttgctcactcaagggcaatgttttagcaattttcctctctctcctccacatcatcaaattataactatgaaaatttgctgctttctccctctcctttgcagaaatattaaaagaggcatctgtatttgccatgttcccttattttccccattctctcttaaacccactccagtgcatcttccatccaaccacgtgctgttctcaagggcactaatgatctcccggtttataaagccaatgtttctctcttgtcttcattgtacttgacctattctatcagcagcatttgacaccactgattactcattctgctctggtgtactttcttcaattgcttccaagacaccataaattcttctgccttgctggctgcctttgctggttcctcctcttctccctgacctcttaatgttggagaaccacagggcttagtccttggtcctcttctctcttttctttacactgtggtcctcagtgagggagataggtagatccactgtcccgatcttaacccaaagaaagacttgctgtccagctacgggggctgtggtcagaaggcagcctcgagccttcagttcctgcaggacctgtctcagggcagagggcggcatcccagggtaggccatatctggtgactgaatgaggcagggataaaggactggtcatatcagcctctgcaggacaaggatgatgggcagtattaattccagagcttccagccaggttgttctacaccactgtttgacttctccacgcggtcctgcttgcttcctctttcttttgcagttcatctaaatgccgtcttcttgcctgtttctggagaaatcaacctacaactcttggagatcccctccggtctcatgactgcgaatactttccacatgctaacaactcccaatgcatgtctctagccagtgctttttcccctagactccacaatcgaataccgcactgtgcacgtacaccctctgggtatcttccaggtgcctttcccagctgagctaagggcaattgaaccctcccaactattcagaccaaaatacttggtgccatacttgccttccctttcctttcacatcccacatcgaatcagtcggaaaattctgttgcatccactctccaaatatgtgccaatccaaatctcttctcaccccttcctgctgctgccactataatccgagccaccattctctactagattacgacaaaacctctgaacaagtctccctgtttccactcttgtccttctacaatccatcctcatccaggaccatggggatccttttaaagtataaattagatcacagcattcctccgctcaaggggtaaaagccaaactccctagagggacccacaaagcatatcacccctctggcctcgttattacttctctgtcctcatctcctgctgcttctccccttgttcatgccactgaagccacacttggcctcctcgatgttccctgaactttccagacacactccctctttctggaacattccaggtaggctgctaatttctttatattcttttagtcttcattcaaatggtaccatctcatcactataccctaatctaccccgcttacctcccagaactgcccacccacccaaagcaggtctactttgcttttttaaaatatcatttcccacttccaacacactgaatcattaagttaaacttaattaattcatttaaaatgaagacgtaactcattacaattaataaacaattatttattttttaatagtaattcacaaagacaagggtctttgcctcttttgatcaccaaagtatcccaagtacctaggacactgcctagcacacagtaggacctaaaaataaatacatttgttgagtgaacaaatagtatttgctcttcacaagattaggttggcagaatgaagcataaagggacaaaaataaaacaaagaaagaaagagaaggtaggagacatagaaaatacagtgaaagggccgggcatggtggctcacgcttgtaatcccagcactttgggaggccgaggcaggaggatcacaaagtcaagagtttgagaccagccaacatagtgaaatcctgtctctactaaaaatacaaaaatttagcagggcatggtggcgggtgcctgtaatcctagctattcaggaggctgaggcaggagaattgcttgaacccgggaggcagaggttgcaacaagtcgagatcacaccattgcacaccacctgggagacagtccacaactctgtcaaaagagaaaaagaaagaaaaaggaaggaaggaaggaaggaaggaaggaaggaaggaaggaaggaaggaaggaaggaagggagggagggaggaaagacaatgaaaggatgtaatatgaagaaaaaagagaactggactgaagagatacaggttggaaatttcccaaaatgcaaaaaagataccaacccatagattcaagaagtcctacaaaccctgaacagaataaataaaaatatatttacacctagacatgtcatagtggaactggaaagccaaaggcagagagaaaaaccataaaagcaacaagaaggagactgatgagctattgtactaagaagcaacaattaggcagagagccgacttctcagcaagaacagatgccagaagataatgaactggtatcttctaagtgtttgaagaaaatcaccgccaactgagaattctatatgcagcagaaataaagataatttaagacggacagaagtataataataataataataattaacaataatgtcttagatgtttagaatagtatgaaagaaaaaaatttactatatattataatccagtagagaataaaaggagttaatatactctaatgtccttgtattatctaggaaggctaatgtccttgtattatctaggaaggcttcaaagtactaatttatattagactttgcaatccaaggtagctatgggtaatcctgaggtttttttaataggatagacattaaaaagccagtaactgatcattctgactacattccaggtaaaaacttagttgtttacttaaaaaataaacaagacaataaaatgcaagccacacggtgagacaatgtttgcgactcatgcaactgacaaggagatattatgcagaataatttaaaacacacacatgcacacaactgtacaaatcaataagaaaaacatcaactaccaaataaaaaatgacaagtgacatttgtcaggcagttcacaaaagaaaatattccaatgaccaataaacctatgaataggagcttggccatgctggtttttcaatttacaaaatgtaaattcaaaccaggaaatccacttattaccagaagagctagaattgaaatgactaataacaccaaggttttctgagggcataatgcaagaggaactcccttatcctactagggagagtgtaattgggtcaggcactttagtaaagatgaaaaatcagcaatttcaattctagaaatacaccccaagaaacacatggacatgagtgctggggaaggtatctccaaaaaaagtccattgtagcactattcacaatagtcaaacattggaactaatccaaatgatcaccagcagtagaatggattatgaagttatagcctatttataccatgaaattgtataataattaaagtgtacaaactagagctacacccaagagaaaagttgaggaaataaagccagacccagaatacttaataaagtatgattccactgatatacagttcaaaaacaagcaaaattaaactacagtgcttaagaatctacactcaagcactaaatgtgagacaagaagcaaaaatatgattccataaaaatcaagcctggttgttatctttaggaggcagggagaaaattgtgattgaggatgggaggggaggctttcttgggggctgccaatgttgcatttctcgagctggtgatggccacattacccagtaggctgtacagtcacgtgttgtgcactgttctgaatgtgtggcatgtttcacaatttaagaagagttataaaatccacataaactatcctgtagacgaatatttcccactgaatagtaaccccttcccaaataagaaagccttttagattttggctatagatataaaatcttgtataaatatcactgcttcattaaaccactcaaaagcccaatgagtaacacatttaatgacagataagacaactaaaggtgatacttagttcattaagacattctcctcttccaactattaaactaatagcagatgatattatcatagattcctttgaggaagaaagattagatagatagatagatagatagatagatagatagatagatagacagacatgtgtatacatttggtatgtatacatatacacatatatacatatacatgcatgtaagtgtatatacacatacacatatatgtgcatgcaagtatacatatatgactgacataaaaacatgttccttggctgggcacagtggctcatgcttatagtcccagctaccagggaggctagacagagagattgcttgagcccaggaatccaaggttacagtgaggtatgattgtgccactgtactacagcttgggtgacggagctgtcaccctatcccttttaaaaaaaaaaagatatactctttactgtgactttatttgaaaatgaaggcagcataagagtgagttcagtgcatccaccctcttccttcactctctctctggtgtcactggactggatgagttatggacatgacaattccagcccaagggcactagaaagtaagtgagaagggaagagctgacttatcccacactgagcccagagattcaaaccagccacccaaggttcgcctttctcttcatgacgagtcatagatccattacccattaatgcagtgacaattattattattattattattattattattattatatttgagaaaaggtctcgctttgtcacccaggctggagggcagtggtgcaatcttggctcactgcaacatctagctcccgggttcaagcgattctcctgcctcagcctcccgagcagctgtgactacaggcgcccactaccacacccggctaatttttgtatttttagtagagatggggtttcaccatgttggccaggctggtcacgaactcttgacctcaagtgatccacctacctcagcctcccaaagtgcttgtattacaggcatgagccactgtgctcagccaacaattatttttaaagcaatgctagtccatcaccccttagggcagggagcgctcactctcattcttacttacactgtaagggggtttatcattgtattttctgattaggatgccctacagaacaggacatcgagttctctgatgggtattttttttgcataggattggtggaagagactattcctttccccctttatttgtaatgttttcctctgtactgcacctccatacttcttccaccatccttaaccacaagatgggcacaggatccagctgggatcattgttgaacctcaagccctgtacacagtgattggtccaggggtgggttcacgatcgatattagctaatcagagaaattccttgggaatttttttattttaaaactgcggacgtcagcctaaaactgctggcagccatgcttctgtttggttcaagctggcctgagaagaactaatctgatccagggaaaacagggatgaaagacagagagcatttgatcgtgttaacttccctgggtccagctgtcccctaaccccagccttaccctgactggtacacagacaaacgtattcccactttggccctaaatcaacttaggtttctgatccttacaacccaacattctaacaggaccgggattttgtttttttttctgggttttttaaatggttttactgctgatgttgttttgcaggggtaagaagcagagaagatctgctcctgtgatccacaacactcctccataccacatatttgtgcaaaaacatcttgttagtccctaagcttcctctaatgatgtcttttaaaactgcaccttacatgtcttctccttgattaacacccttgtttattacctcattcaatcctccttttcccttttccaaatgctgaatgatcacacgatgaatgtcttagatttttctctcttctgtgaaactgctgatcactcccaaattaagaattaaaaatggagcagctgcagacgctttgctagcatccagattacaatcttagagttcttccagaagaaagctctctgtttctgaggaaactctggttggttggggggcaacccaaggaagtatctctgaaaccacacaacatgcaatgaaaccacaggaaaaaaagggggagggggttcttcctgtgtatttgctgaagtattttgctttaagagagatcagtggtgttcaatttcaagaaagaaacacccatgaggaaaagtgcagagcaaaacagccccaggacatctctacccaacacacaggcctgctggtgtcacttgcattgaacttatacatttcttcattatcctagtaataaagtctgtgatttcagcattttacaggaaggtaaaaacacattcacaatagcactagccgatagctttcttaagtaactgcatggtgagcttcatagtatcccccgttcctaaagacagattagaggccccagcactgcactgtttcagatttctgtgggccaccaaaaataaaaagcatcccaggtggagtaaacttgttaaccaaagggctacttaaaaataaaattgcttgtagagagctctcttacagcttaatgaatgaggcaccatttctcaaactaagattgtgatcaaatgagaaaccctccaaagacctctgctgaatacctcacttacactcaagcctccgcagagggagccaatgaatgagcccccagcaactgaagtgggtgtgggggagtggagaaggttatatttgagcatgtgatggtagaattgagaaagcactgagacatcagccacagatggagaggaaagagcagctctacctataggaattgttaataagagttctgtactctctattaacaaatcttggaacagctgacaccatgatggccagggaccatggatggacggatggatggatgggtggatggatggatggctgcatggattgattgatggatggatggacgaatggacagactgagtaaagaatggtggcagttacagctgagtgggtgtgtgttgatgggggaggaaggacagaggacaggccaaccacaccataattgttgagtaatggcacagtccagagtgggcaaagtttttctttaaagaatcagataaatatttcaatctttgcgagccatatactctctattgagctctgcccttgttatgtaaaagcaaccaaagacagtaagtaaatgaaaatgactttgttccaataaaactttattcatgaatgctgaaatctgaatttcatgatttttacatgacaccaattattcttcttttccccccagccgcttaaaaatgtaaaagacatttttagttcaaggatcttacaagaatcagtggaatttggccctcaggccagaattcaacgaccccagatctagtctccaaacacgccagtcactcaggatagtgatcaggaaagaagatctccccagcagatcctgggaagagatctaacacaacgcacattttctattctgtgctctgtatatacttctccttctgtctttattgcataattctccatggatgtgctgatgtttccgtcttgtccaatgggatataggaagcacctgctggcagggtctgtgtctcacttatttctttctttttttttttttttttttgagagggagtctcgctctgtcgcccaggctggagtgcaggggcatgatctcggctcactgcaagctctgcctcccgggttcacgccattctcctgcctcagcctcccaagtagctgggactacaggcacccgccaccacgcctggctaattttttgtattttttagtagagatggggtttcacaccatgttagccaggatggtctcgatctcctgacctcgtgatccacctgcctcggcctcccaaagtgcgggattacaggcgtgagccactgtgcccagcctgtgtcacatatttctaaatcttcagcacttggcatagtacctggaacataacaggtgcttgagagatattccctgaatcaaaccatattccccaacaactgcaagatttcactgtcaaagtatgacataaggccgggcacggaggcttatgcctgtaatcccggcactttggaaggctcaggcaggtggatcacgaagtcaagagattgagaccatcctggccaacatggtgaaaccccgtctgtactaaaatatacaaaaattagctgcacctatagtcccagctactcaggaggctgaggcaggagaatcacttaacccgggaggtggaggttgcagtgagccgaggtagctccactgcactccagcctggagacagagcaagactctgtctcaaaaaaaaaaaaaaaaaaaaaaaagtgtgacttgaaaggcaatccaccttgataccaggcatcccctatctgatgtcacagccatgaatactatgcccttggcccttgggatggttgacagaggtcataggaagtaaaccgtactcataaccttgaagctggatttcaccctttgccaaaagcaactcttagtttgtcacattgtaaaaggcaggaaaccagttaccttattcttgccatgaccacacagatgttacttaacttacgcatgtcccaaatggaaagaaacatatccatccgttagcagagaatgaaaaacatgtcaccctttggctcctcagtttgggaattgatgggcaatgaacacactcctggttccttttctttcccatccatctctccctccaggccatccatcaggagaaagctcaatgtcatcttcatggtgagcactatgtagccatatcctacaggctttctttgcaatacttaagtttccaaggaaggcagagactattaaaaagaggatgctcaggggctttcttttttcagacagagtcttgctctgtcacccaggctggagtgcagtggtgccatcttggctcactgcaacctccacatcccaggttcaagcgattctcctgcctcaacctcccgagtagctgggaattacaggcatgtgccatcatgcctggccaatttttctatttttaacggagacggggtttcgccatgttggccaggctggtcttgaactcttaacctcatgtgatccacccgcctcagcctaccaaagtgctgggattataggcgtgagtcaccatgcccagcctctttttaacactttactggaaatcttgactagaagtatgccagggtcaaatctgtatacaaagggaatacaaagaaccacaggagaatctgtaaggaaatgactcatgagtattcagatttggatgggtcccagaaaatagctccagaaacataattgcaatcccaggcaggaagccaggcaggcaggtaagcaggcaagaagtaaggagagaaggaaggagggagggagggagggagagaggaaaggaggaagtgaagaagagaagaagggcacaaacagagcaactcacctggttcatcctcaacccccacctgccccagcagtctttcagttgcaagccctatgaacagcaaaggggacacagagctggaagaacgccactattgcctttctctaggtaggtctgtcagtaactctttgcttgatttgcaccaagacttagtttcccagtcaacagaatgggactagaagtacccagaccaacaggccgaaataacctcattctgtacatttttgaaattcactagttatccattttaaatggcatttggattctttttttctttgtgaagaagtctccatagcaactgaacttgaataccttggtattcaacccaaacttacctacctaataagtttggcaagaatgtttttattcttttcttaccaaaggccacatttaagaggatccagaaattctgacaggcctcatgcattctatctgagaccaaagagcagacaaccaagagacctgtttatcagcaaaagcagcaacattccgtttcttcgccatttgggtaactctgtcctttatcaattacagtccttgacagactcattcctattcgttacctatttgttcttgtgtgttggtattatattttccacatcctcatgggccactaaattataatattttaacttcaaatgacgtctaacttggaatcacgtaatcaatattactttactgagtgtttatcttccctaaactgcttcatggaccacaaaagaagacctaaaaaacaacatctgatgctcagtttcaatggatcaatgagctgaacccaaaaatagccactctagaatattcatgagaggcctctcagtataactggaaacttcataccaagtttcactttcaaagaattcattttaaaacatgttctctgattttaaactcagttatttatatgatattaaagagactttaaccaacttgatggcaaacctaacaaaagatgtctaccaattattttaacttcatcaaaggttttaagggaaactatttaagacatattaacaacttcctattttgttccataggccccattcttaaaaggctcctcagggctttaatattccataatattaaaagggctttaatattccataataatttattttacgctttcttaataaccttttctcaaactccaggtgaatcatttctgcaatttgttactgtttgtagctcaacaaattattcatttgagctggctgagccacacgcataacatttttaattagagtgccacagttgacttcaaatccaaaatatcccaatccaaaattattctgtaggcttcggatttgctgccaggagtctaaaaagctaaaaatagcgaccaaactttcacatcacaaggcagaaaaaagcatttcaagaaagcgtacaggcttcaaatagatgcgtgaacagatcccaaaaggcaggcataggctgacaagacttcagatttgaccgtccccagtatacttatatttgtaagaagaaaaggacgggagaaaaactcagtaaaacagcagctcataatgataagctacatagagtagcagcagggggaaatatggcaaaactggtaaaatacaagcgtctagactctctttagtataaaactaaagatattaaattagcatgtcaattttgaacaaatctataataatgcaatcagcaaacttcagaatgtaagatactttacaaagcaaaggacttggactcttaagtaaagagaaaagagaagaaagaaagggatgataggtcgggcgtggtggctcacgcctgtaatcccagcactttgggaggccgaggcgggcggatcacgaggtcgggagatagagacatggtgaaaccccatctctactaaaaacacagaaaattagccggccgtggtggcgggagcctgtagtctcagcttcttgggaggctgaggcaggagaacagcgtgaacccgggaggcggagcttgcagtgagccgagattgtgccactgcactccagcctgggtgacagagcgagaatccatctcaaaaaaaaagaaagaaagaaagaaagggatgataatgaggaagctacatgagactgaaggtacacatgcatcagttgcaaggtgctttggtctcaatgtctgtgtgcccttcagattcatatgctgaaatcccaacctccaaggcaatggtattagaaggtgaaatattagatggtgggaagggtaggagggaagggaggataaggaaaggttgcttaacagataccaaattacagctaaatggcaggaataagttctagagatctataccactatagggtgactacagttaacaataatttattgtacattttcaaaaagctagaagaaaggattctgaatgttcccaacgtaaaaaaataataaatgtttgaaatgatggatatggtaattactttgatttgatcatcacacattgtatacttgtatcaaaatatcactctgtgtcccataaatatgtacaattattacatgtcaactaaaaataaaaggaaaaatacatttaaaagaagaagaagggttaggaggctgaggcgggtggatcacaaggtcaggagttcgagaccagcctgatcaacatggtgaaaccccgtctctactaatacaaaaattagctgggcgtggtggcacgtgcctgtaatcccatctactcaggaggctgaggcaggagactcgcttgaacccgggaggcagaggttgcaatgagccaagatcgcgccactgcactccagcctggggtaggacttttgggaaataattggtgtccttataaagggggcctaagagagacccctttcccttccaccacatgaggacacagtgaaaagacagtagtctatgaaccaggaagcaggccctcaccaggcactgaatctgccttggttttggacttccaatacccaagaaccatgagaaataaatttctgttctatctaagttacccagattagggtgctttgttataggagccgaatggactgagacacaatgtatgggtgttatttggatcacgattcaaaaagatgagctgttaaaaaattatgagacagaggttaagtttgaaaagtgaccatatgcctgataatattgagatacacaggcaatatggcttttctttttattttttgaacccagacagaggctggaacaatatggcttttttatgttcttatctttagcagtatatacagatgaaatgagagcatatctgtgattcatatacagacaacccagtatgggtatgtgggtgtgtttttgtgtgtgcacgcgcatgtgtgtgtagtgactgcaggccaaagtagattggccacaggttgatattccctgaaggtgggtgatgagtatgtgagagtttctgtgggggtttatatactatcctctcaatgtgtaaatgtttgaaattacccacaataaaaaggttttcaaaaaacaatatgtacaagacatactgcggtctatatgcccagactatacctctgggtggcctgagggtgtgtgtggcctgcagacatattttgtttggacagtggactgtttaaaaaaatgttgtttcctttttgatccaatatttaaaaataagaagacttcacataaaaattaggatttccaactaatcttgaaaaaatagaaagatctggcagcagtaggctatagcaacaagccccggtatgcagcctgtgccgccctctctcagacccagcacccacacatttctggggcctccctggtctgtggccatttgagtttggcccccagtgtcccaggcttttcagagcagcaactcagtgccaacctccagggacaaactttccagaatgactgtgttcttctctcagcccagactcctagagctttgttttctgaccagtcatcaaaagttcctgacaacaacttcaattcaagcacttgaagagttttagtttatattacacaaagcggtgattcaaaacatatgggtagtcaacagactggaaaagaaaaccccagagtttctgaagtttatttggcttgaggacctctggccggttctgccgactctccttatcattcaggcaacaggactggctcctgtcttgctccacagactcccagaatgcaaaggcaggaagggggctaagagctcatttagtaccttcctcctcattttacgatgagactcaagccaagggaggttgagtaattcatccaatcactttccaaggggtctctggaggaagggatgggaaagaaaatgtaatgtaagatggagtgctgacagctcctatacacatgccagagttactggatgacaatttgttcctgcatgtttttactccctgcaaagtacttttccagtatgattatggaacaagagcaacgtttctctagaaaaagatagattttcaaccttaaaaagaactaagggttgaaccacttgggtcatgatattcctgtttaatggaccactctaagaggaatgaccgttgatgaggtctcctggcacctaactgatgttcctcacttgtacaattacttgtcatcaggcaagaagacaaataagaggaaggacaggaaagtccttctaactcctcaggttctctgaagactcttttagatcctagactcttcataacggctctcagactcattcaccccttcagcccggctgagtcaaaggaaattctcaaggtcatgcagtggccaccatatttgcagagcccaccctcggtgaacttgggttcttcccaaagtgaactcacccagttaacaatagactattcttgaaatttaattaattcaatggcagacaagccaaaagaagagaaattaaagcaaccctgaggcaatatgagtttgcacagtggagtacatgtaatactcccagctccccaacgcggaaggctcattttcctctagttccacctcatgggctggcacatcccatcagctttcttatcacttctgatgggctttaagttagcaactcttttctcccattaaaaatgtaggaaaacatcatcagattttgtcatccaaggtctataggcaccatagcaatcacttagctggggttccccggctttctgggcatcaaaaactgggcttgaggagctccttctgggccagtggtcacaggttatatcacattaattagtctgactcataattgctcaccaccactgttaagctgaaaaggtttgaactgagtgcccagtaggaaatatggaggctttggagccttaggggggcatctgtgaccaacccctgctcagccggaacctaagaaccacgagagcagtgggagaggagccacagaaatcagtctggcaagagagggccaaagttgaaactgagacagtggccacagaggtgaagagaagatgtggacaggaaggggcaggcgagggtaggggtgggggcagggtttgaaaaactaggtagctagagaggctatgtaccaacatgacataaaagatacaaaactggctgggtaggtggcttacacctgtaatcccccagcacattggaaggccaaggcaggaggatcacttgagaccagcctgggcaactcagtggtgcggtggctcacacctgtaatcccggcactttgggaggccaaggcaggcagatttcctgaggttgggagttcgagaccagcttgaccaacatgaagaaaccccatctctactaaaaatacaaaattagccaggcgtggtggcgcatgcctgtaatagcagctactcgggagggtgaggcaggagaatcacttgaacccgggaggcagaggtttcggtgagccgagattgcaccattgcactccagcctgggcaacaagagcaaaactctgtctcaaaaaaaaaaaaagaaaagaaaagaaaagaaaaagaaagaaaagaaattccttctctaccaaaaacaaaaacaaacacaaaaattagctgggcatggtggcacgtgcctgtggtcccccagctactcaggaggctgaagcaggaggatcatttgagcccgagaggcagaggttgcagtaaggtgagactataccactgcactccagcttgggatacaggatgagaccctgtcataaaattcctttcttttgctctgcattagtctcttttcacactgctgataaagacatacccgaaactgggaacaaagagaggtttaattgcacttacagttccacatggctggggaggcctcagaatcatggcaggaagcgaaaggcacttctttcgtggtggtggcaagagaaaaatgagagacaagcaaaagcagaaacccctgataaacccatcggatctcgtgagacttatttataagccaaaccatatcatgctcatataacaaatatgccttgagcacctaacatatggcaggtactgtgcaaagcactaagatacaagagacagcagaaaagaacagggaagaaacagaaagagaggcaggagggtgtctggaatttttttctttcaggggagtactagagatgagagaagagtaataagcccattcagagagatgctgagttaaagagaaagctgatgagcagaagaaactagagaaaactaattcaagaaaatgatcaaatctagccatgcgtctacataaatatacttccttttcccccatcgtttaaatcaaaatccctcttacctggtcgttccctcttcctctccccactcctcccatatcctcaaagctgccatcacctacaacagctccctctggaagcagcagcatcctctcttctcactcaagcacagccccaaccaaggtcaccagaagccccacccccaccacatctgtcactctaaatggcctttcccctccttggtatctgggtagcccctgaaaccaccagccatgcccttgttggggaagcctctcatttaaattctgtaccaattacagaaaattccatgtaagttccagacccaactcgctcagtgcttggcgctgtgaagaatgccaacaccgagtatggaacccattcctcccaaatggcacagctggtgtgcagcgggcagggggcgatcccataaaacagatactgggtgctggtaagaagaggatgggaagcaaccactgggcaaacgatcaaaaactatccactacagcatccaagtttccttcctgtagctttgacaatttcttcccaaacttcctccggctccctttccttctcccacctcatatacctacatatacggaatattctgcatctgtccctccaaatgcccattggaactctcagcaacttcacacatctactggaatccagcactcaggactaaaggatcggatatcctccctccctgactcctcaaattgacctgaatctcaaggtggaaggaagagatggacaggaacaggaggggctgtgaaactcaagactccctgggacaagctgacacttgctctgggttcccacccatcacgctgctcctgcaaagaagttcatcccatcaaactgaaggaaaacatcaggttcccagcagggggacagattgttccaaggcaatatgggataagacttggttcccagaatttatttattcagcttctaggaccaaagcgacaactagccaactgataattttggaatatatttataaaagaaaaacaaatattcgttattcctctgggccattaaattattttaaacagataataccctcctttaaaaaaagattaaatttctattttcaaccactaaaaatgaagtttggcatagattcagtgatgaggggaagcagagagaaatttagcaagaaatggcagagaaagggtgaaatttctggtctttacattagacacagtgactcagattctttagtttttcaccttgtactagaattctctgtatgttttttacacacagcagagaaatatacccacttttgaactcttaattttggctctttattctttactactaaataatattctaagaaacatccagtatgcggttggctttcacaaacatttcagataaataaaacatcagaaagtcactgtttaatagaaaaaaaagtgatttccaattaccaccaacattctaacaaacacaaacagagcaaagccatctacctccaggcaaatgtggtgtttgggtacaaaaatgtacatgcatttgtgcatgaatatgtatatatctccgtgtagtatacacatatacatgtgtatgttcaagtaataaagactaaacaatgggcaaaataccagaattatcagaatcactttcagtggtaagtaaataacaattattttccccttcgtccacctttctgttttttcaacttcccaccatgttcattcatatatagaaaaggaaaaatcaacaactttattttttatcacacatatgaagatgtatgttcttataaggtatgctcatcttcttatatcaaaaaagccaggcactaaatagaaacctatacatcctgtgccaccaaaaaaacccataaattgcaaagtgaagctgagtttctcttttttttactatatgcaaacctgtttattaagagtagaaaaaaggccaggtgtggtggctcacgcctgtaatcccagcactttgggaggctgaggcaggaggatcacaaggtcaggagttcgagaccagcctgaccaacatggtgaaacaccatctctactaaaaatacaaaaattagccgggcatgatggtgggcgcctgtaatcccagctactcgggaggctgaggcaggagaatcactggaatccaggaggcagaggttgcagtgagctgagattgtgccactgcactccggcctaggtgacacagtgagactccacctcaaaaaaaatttaaaaaaaaaagagtagaaaaaaatagagtcctttgtgtcaaattgctatgtatatgcttaagggcaagcatttcgtaaacgatactgccacatcctaccctttgttttttgagatctctggttctctatttccttaattgtgcttccccacatagagctaaaatgagtagcatgaacagatgtatacattcacacacgcatgtacacatgtgcacactcacacaccatccctgataaatgcatctcagtctctgaccataacaccaatcaccaagaacatgattctccccaaaccataggtgctatctcaggctcctgggctcactgtctcgcactccacggtatgcagggcacccaggtttccgtctgcaccctctccatttcatgtttccacagggaaagacatacagtgtttaaagcaaactcctgattatgcgtgctaatgaaggcaaacattggcacagatgcgtgtttggcacgagatttccctaattgcattttgcttaggctaccatcaaaattagttagtgctcccccaaacacacgcacagcagagggaggaggagatgcccactgaaaggacttgtgggtgatggagggatggctaaactgtgacatcggcctcaaataaaagaaccttttccatactcagtgcctacatgctgactaatgtcatgttcaactggtctttaaagtgcagaggaaatctagaatgccttctgtaatatcctggatgaatggtaagtgatggagctccaatctagaaagcacaaaattttaggcaactccttgctctgcttctgagataggaatttttactttattttattttattttttgaatcagagtctcactctgtcacccgggctggggtgcagtggcacgatctcagctcactgcaacctctgcctcccgggttcaagcaattctcctgccttagcctcacgagcagctgggataacaggcggacgccaccatgcctggctcatttttgtctttttttttttttttttttttttttagtagacacagggttttaccatgttgggcaagctggtcttgaactcctgacctcaagtgatctgcccacctcagcttcccaaagtgctacgattacaggtgtgagccactgcacctggctgaaactttttttttttttttttttaagatagatttaagagatgcctttctgcaactcccacctgctggagaaactcagaccaattctctatcatttctgtatggtaagccttcaaataacagaagaaagtggtcctgtcttcccttactgcttcttcctccgggtaagctgctacccttggcagggtttcctgtcaccattttggttctgctcgtctgactactcaactcactcaaggtcttccttaaaacactgaccatggagctggctctagtcctcaagggctggagtgccctcctgaaaattcagtgggatcaggacactatgctccccttagcccaagagtgggctcattcatctgcagtgactacatcacgcctctgacagacactgatgccaagccaaacccttctgtatatgtacaacaatttattctttttgtctcattgtcctcaaactgtacaggacatcacattcctgctttttaaaggttatctagcaggtttctgtctgccatcctaggctactaagggtatttagactttgtactgaagatcccgcaggggtcttcttggataccacatctcccatccagatgcgatatccagttcagaaacagtcagcagctacatttttcactgtgtccattgaggaataagaaaaaaaaaaaaaagtgggccaggtgcggtggctcacacctgtaatcccagcactttgggaggccgaggtgggcagatcacttgaagatgggagttcaagacctgcctgaccaacatgaagaaaccccgtctctactaaaaatacaaaattagtcgagcatggtggtacatgcctgtaatcccagctattcaggaggctgaggcaggagaatcacttgaacctgggaggtggaggttgcagtgagctgaggtcatgccattgcactccagcctgggtaacaagagcgaaactctgtctcaaaaaaaaaaaaaaaaaaaaagtcattaaaagctgcaggagagagaatgacataaataagaagaaacaagataagccaaaagagccacagagcccagaatcctgggggcctcaccatccagcacaatccctagataggtaacattactgttcatgttagccaggaggcaccttatgtcttcaaaaaaaattaacaccaacctcctttaaaaaaaattcacatgatcttggcttgatgtatgttatttgcaaacaggagtcctatctaacatagaaactattctggtagaaaaagtcagtgtcccacataaagtaccttgccaatttctattaaggtattgggcagtctgtcctaccagtgtgattcactaattaactttctttggtacgttccagcctgcttcaaatccgcaaggatccctgctctccaaagggcattttagtatcttaaccctcaaggcttttaaccattttactcccatttctacttggcttccctgattccctgaagacaatctttttcccactcatactcgctgccacacaatttggccaagagagttggtcttcggtatccgtaggttctgcacccctgggttccaccaactgcagatccaaaatattttaaaaaaggaaaaatagatggttgcactgcatccgtactgcatatgtacaggcttgttttgcttgtcactattccctaaataatgcagtataacaacaatttacatagcatttacattgcattaggtattataagtaatctagagattgcttataatatattggagaatgtgcataggttttgtgcaaatactaaactattttatttgttttattttgttttttcaattgagatggagtctcgctctgtcgcccagttgacaatgcaatggcgcaatctcggctcactgcaacctccattgcccgggttcaagcgattctcctgcctcagcctcccaagtagctaagattacaggcacccgccaccacacccggctaatttttgtattttcagtaaagacaaggctttgccatgttggctaggctggtcttgaactcctgacctcaggtgatctgcccacctcagcctcccaaagtgctgatattacaggcatgagccacctcgcctggcctacactattttatataaggaacttgagcagccatggattttagtatctgtgggggagcagaggtctggatccaattccccacgaataccaagggatgactatacagtgacattaatgaaataacatcaatgaataatttctgcttccaaaaacactgcactatgccctagccaaagaatcacccaaggttggactctaggcaagttataagtaactctagactccaaatggataatagaagacccagtccttaagaaaaaaaaaaaaatgtgaaaacgtatgtccacacaaaagcttgtacacaagtttcgtagcagcattagctgttatggccaaaaagaaaaataacccaaatgtccatcaattaatgagtggataaataaaatatggtacagccatacaatagagtattacacagcaataaaaagaaatgaagtactgagacacaatacaacaaagatcaacctcaaaaacatgccaagtgaaagaagccagtcaaaaaagactccatactgcataattcctttcatataaaatgtccagaacaggaaatctatggagacaaattaaatggttggggttggggattgggtgagaagagctggagggaaatacggatggctggtaatgggtacagagtttcttctgtcctaagaacaattttgaggatggtggcaaaactttataaatgtactaaaattatggaactggcagggtatgttggttcatgcctgtaatcccagcacttttgggaggctaaggcaggcggatcatttgactcaggagttcaagatcagcatgaccaacatggtgaaaccctgtctctactaaaaatacaaaaaattggccaggcatggtggtgcacacctgtaatctcagctactcgggaggctgggcatgagaatcgcttgaacctgagaggtggaggttgcagttggagcacgccaccgcactctagcctgagcgaaatagtgagactttgtctcaaacaataaatgttaagtggctcacgctgtaatcccagcactttgggaggccgaggtgggtggatcacttgaggtcaggagttcgagaccagcctgtccaacatggtgaaaccctgtctctactaaaaatacaaagttagctgggtgtggtggcacatgccggtaatctcagttacttgggaggctgaggcaggagaatcacttgaatccaggaggcggaggatgcagtgagctgagatcacaccattgcactccagcctgggcaacaagagcgaaattccatctcaaaaaaataaagtaatataatataaagtaaagtaaatataaaaataaaaaaattatggaagtgtacattttaaatggatgattcgaaaggggtatgaattatagttcaataaagctgttttttaaaaaatccatcagaggataattaatctattaccacagtataaagaaaaggaatagactcaataccctactttttttagttcattaaaatgtgggtcaaaatcctaaatttaacatatccacaatgttcataaagcagtttatatagttaattccatataatttgcattgtaccggatcggttagggacaggggctttagaataaaactaggtttaagtcccaaccccttcactcacatgttgaatgacctgggatcctcccccaagccccagcttctctataggtaaaatgaggaaaataatagtgcttctttcaccgatgagtgagtacctgacacagtgcagcactcaaacagtaactttataagtaaataaataacaacaacaaaaccaagtacttgtgtgcaatatactaaaccttgctagaagacacagataatacagtccctttcttctattagattatgacaccaagctgactgtttagtgctgcaataataagaatgctatggactgaacatctgtgtccccgcaaaatccgtatgttgaaattctaatccctaaggtgatggtatttggaggtggggcctttgcggggtgattagacatgagtggagccctcatgaatggtattagtgctcttataagaagagacactaccagcctagacaacatgctgaaaccccacctctacaaaaaatagacaaaattagccaggcagccgggcacagtggctcacacctgtaatcctggcactttgggaggccgtggcaggtggatcacttgaggccaggagttcgggaccagcctggccaacatggtgaatccctgtctctactaaaaatacaaaaattagctgggcatgatggtacacgcctgtactcccagctactcgagaggctgaggaacaggaatcacttgaacatgggaggcggaggttgcagtgagctgagatcacgccactgcactccagcctgggcaacagagtgagactctgtctcaaagaaaacaaaaaaatagccagacatggtggtgtacacctgtagtcccagctatttgggaggctgtggtgggagcatcacctgaggctgggaggtcgaggctgcagtgagccatgatcacaccattgcactccagtctgggtgacagagtaagaccctgtctcaaaaataaaaaacaaaaagaacagacactagagacatcctctctctctgccatgtcaggatatatatagagagaggctgtcttcaaaccaggaacccaatcatcagggaccttggtcttggacttcctcaccttcagaactgtgagaaataaatgtttgttgattaagctgcccagtttgtggtatttcactatagcagttcaaactgcctaagacaaagaccaataaagcattatgaggagagacttgtgcagaagacatttaaactgggtcaagcagaaattcttgaattagagaatgaaaagagggaaggaaaggaacaaaatgataagcacatctcccatgcaatatgcttttgctaactcttatccaaacaccagagacctctggggctagatgtttgaacgcttatcagcgcactgtatatccgtatgaaaaaccacaaggtaactagaaaccattggctaaaatcataggtgacaaaaggcatgacttgagatttacgccgtgtctagaacataagggcagaagaaaataaaaagcagacagattaattgtgtattttgaccaaggtacaaggatcaaatagatacatttcaatttccaatttccacatttctgatcattagctaccacactcctatgtatctcatgaaagaaagcaagaaatgaattatctcagagccaaacaacctcctgacaactctttgatctgtttttttccgaaagactgactacctccaatgacactgctctctgaaaaggcaattaatgagacggatgtagcacactgaatgagaggattgaagtacctatgctttttcttttgacagtttataaaacagatttttttaacatgtcagtcaattggtgatattttaaatgagatcacaaaagtcaaggtctttgctacaaaaaacacggcaaacaaactaaaaaaattaatgaaagcatgtgattctagtgtgaaacaacgacccatgtgtcattattggttcaagaagtatgcttttatgccttcaatatggaaaagtaatcaatttcaccttggcgaattaccattatgcacttaggtttaaactagatgtctcaatattatcaatatcttttagaagtgtaaaacataggccaggcgtggtggctcacacctgtaaccccagcactttgggaggccaaggcgggaagatcacctgaggtcaggagttcaagaccaacctggccaacatggtgaaaccccgtctctactaaaactatgaaaattagcctggcgtggtggtgggcacctgtaatcccagctactcgggagactgaggcaggagaatcacttgaacccaacaggcagaggttgcagtgagcagagatcgtgccattgcagtctaccctgggcaacagagcaagactccctctcaaaaaaaaaagtgtaaaacataatagttccataaattcagaatacttaaaagagtaaagcttttaatcccagccctgtcatgatctaaacatacagtgattctctgagtgccaggggccactaagcattacaaggattgtgcaaaatgatgttcattgaatacctattatgtacccgaccctaggctatatcccactccccaggaactcaaaagttggtaggatgagtcctttcccaggcacctcttcacacttcaacagttctttcactcaaccttacaaacaggctcaaaatgggctttcagagattcgccaaactgatactggcttgtccaccaacactgtacacctatctctttcaggctgtcatttccacggacaattcctgacatgccttgggaaagaaaacctcctgtatctacatgggactacaggtatcacatcgtatatatgtatctccataccttgtatctatctactacataaggttacacaccaacaggacgtgtccatgtaaacaaggtaggcatgagaaatgaaaagcgagctcattacagtatgtggggcactcgatttctttaagaccagcttcatttgctgtgattttccactttccagagtgaaaacctggaacggaaaatgaaacgatgtttccaaggttatgctgcaaatcatcagaacaatctgggccaatggacaggtttctagatctgacagctgctcctctatctgctgggacctgctgtttccaaattatcatatgcaatcgagcacctcaggagcaatgcaaattgctaaaatctaagtagagcaggtgaagacatttgctggctgacgaccatattcttgtaacgcactctggggccacatatcctgtggtgttcatagatgcacttccagtctcaagcaggggactgggcacctcgtaagtttaatgaacaaataaggcaattaagatactcaaggaaatatataacatctgaagaggatggaaatagaagtaatcaagcaaacacatcatcaaatgaaaaaaaaaatgtcaaagatcaagggggaagatacccaaattaaaaatgttttccctgggaggccaaagcagaagaactgcttgcagccaagagttcaagaccagcctgagcaacatggcaagaccccatctctacaaaaaaaaaaaaaaaaaaaatttaattagctggcatggtggcacgcattagtagtcccagctactcagtaggctgaggtgggaggattgtttgagcacagcagcttgaggctgcagtgagctatgatcacaccactgcactccagcccgggtgacaaagcaagaccctgtctctaaaaaacaaaagaaagaaagctttcccaacctccttgaattattctgtatcgtctcttgtacttcaggatcatacagcttgagtttgctttaaatttaaaaaccagaatctacaaaatatcttaccttaagtcccacaaataggtcaagagctgtcagtggagacccaagagggttgcacagaagggctacacataccactaatggaacaggaaaccatttttagtggtacatggaaaaccatgtttcatctttacagttataactatttttcaatgtgtattaaaaaatgtattagtagcacattaagcccatgacatcaggactaggtaaagtaacctcacacccacacaagcacacacacacactgatatgatttgaatgctgtcccctctaaatcctttgttgaaatggaatccccactgttggaggtgggggctagtgggaggtgtttgggtcataggagatgccacatggcttcatgctgtctttttttgtgtgtgtgaaacatggtttcgctcttattgttcaggctggagtgcaatggcgcgatccaggttcactgcaacctccgcctcccaggttcaagcgattcttctgcctcagcctcacaagcagctgggattacaggcacctgccaccatgcctggctaatttttagtatttttagtagagacggggtttcaccatttgaccaggcaatgctgtcctttcaatagtgtgttctttatagatagatagatatagatttttaaaaaacagactttatgaggttaatgactattatcaaccatcataaaatagaatgggactttcaaaatcatacaagccacaaggctgtgggctgctacgaaagaagggtggggtcaagggtcccaaggcattttggggtgcgagatgcagggagagcctgagagtcacccagtgtctgtagggacggttgggtcaaggcaataagctaggatctgtacaagtgaaacattcatcagaatgtgacccaccctgaaataggagggaggaaaatctttaagagtttcacaggtaaggtcccaaaactacaaaataataagggggtaatgtatattcctcacccagtcttggcatcaatttgtgctttaaaaaatatactgcactggaagatttaaaaaaaaaaaaaaatgtaccctacaccagctgtttaaaacgtaaatcttatgaacaaatatgtatatataataaattttaataatatttaatttaaaattaaaatgtttaatatattatatatttatatataatacatattgattatatattaattatattagttaatataattatattagttaatataattaatatattaattgataatatattaatgttatttatactggtattaatatattatatataatatatataataaacattttaaacaaataactgtattgtgcctatgcagaaatgaaccaaaattaaactctaagagaattaacttcaaggtcaaagcaaggacgaaggtggtggcagatgctggggtatgctatgtggaggggctgccagggacagggcatccctctcctgccagcagcctgcgccagctatctcgaggctctgagaggggctgtgatgaaatggggctgtttccctgggcccgcagccctggcacgggtgctgagcagagacttgtgttggcttctgtgaggctcaactctgctcctggtctcccctatcctgccctgcccctggcttctcagggaatggagacccactcaccctcccttcttggttctgggggtcccctggcatgcccagagcttctgaggatgcacttgggaaatctcacctagaaaagcaaaagcaaaatcaaacccacaccaaaagacccatagaagattaaagaaatgcaaccacgtgcaaaggtgtctaagcccaagaggtaagtggctacctggagacatggaggaactgccgcagcccttccagatgggccgctaagacacccatattgcatgtgaggctatttctccctgaggggactacttgggaactcggagcagagacccctgcaaactgcagggcaagggacccaaagacatccttgtgcctgtgcaagtgtccaacatgtgccacaggtatggcccagggaggacaggccaggtacatacatcttagggagggcacgggtggaaggaaagtaacagccagagagaggtgactgaaacaaggttttgcttcaagagggaatccataaatggcttttgctattgttaaaagaataactacaggatacaggggcactgacagccggaatggatgctgggagcttatttgcctgcggaaggtccttggtttctgccttggtgtccagggtgtttttgacgtcctgagctttatctgctccggcatggccccgctgggctgggcacccatggcctggcaccagcccttgtctaagcacctcttagaacttctggtatctgctctcttagctgtggcaccacctgccagacccaccaccctgggccccccaggtggctacagccttctcttttcccagagatgtggggagcccccgtcccaccccgagagcagactgaagctcaatacagggcttttgtttgtagaagcttattctctttttttttttttttttttttttttggaggtggggggcacagttgagacagggtctcgctcgtgtcgtccaggctggagtgcagtggtgccatctcaattcactgcaacctctgcctcccaggttcaaccaattctcctgactcagcctcccgagtagctgggattataggcacccactaccacacccggctaatttttatatcatggggtttcgccatgttgaccaggctggtctcgaactcctgacctgaaatgatctgcccaccttggcctcccaaagtgctgggattacaggcatgagccaccgagcctggcctgtcttttttcaaggagaggctgtatatggatggtgtgcagggacactgtcttctgacgatgttgggaaggggaaaagaggaatcagtccttgtcccacggaggtagccagcaaggatgaaggggaagaccaaggacttctctctacggctgcggacgctggtccaaggcacagggtgccagccccagtggtgggcggctctgtaagttggtgccaggtggccgtgcatagtggcccgtggtgagcgtcacttggggaggaggtgggcctggagggaagccggcagcagcagtgtgtgggtctctcccaggcgcaccttccccaggggcaggtgcatggagtgaagtcgcctcctcccagtggccctgatgaggaggcctagagcctggttcctgctgcaagcacgcaggctgcccgagcacgacttctgtgacacaatggtgagttctcatgagatctggttgtttaaaagtgtgtggcaccttctctcactctgttgctcaggctttcaccatgtgacatgcctgttcccgcttcactctccgtcacaattataggtttcctgaggcctccctagaagcctagcagacgccgcaaaaagcttcttgtgctgtctgcaaaacaacgagccaattaaagcccttttcttaataaattacccagtcttaggtatttctttatccaacgcaagaagaccctaacacacacacacacacacacacacacacacacacacacacacacacaacctcttacgtgaatacggtgaatctgataaagaagggtacaaatgccagaagttgatctccaagatgcaggggacagggtggtcaagagaaagtgcagagccgggcatggtggctcacacctataagcccaacactttgggaggctgaggcaggaggatcacttaagaccaggagttcaagaccagcctgggcaataaagcaacaccccatctctacaaaaaataaatgaaataaaataaaataaaataaagccaagcatggtgatgcacacctatagtcccagctcctcaagaggctgaggcaggaggatcatttgagcctaggacttggaggctacagtaagccatgatcatgccactgcattccagcctgggtgactgagcaaaaccttgtctcttaaaaaataaaaaaaaaaacagagaaagtggagggagccaggaggctggatgttaagccctgctgcttatgtttttatgcctcaatttcttcatctgtaaaatggggataataattgaatctacatcacagagttcatatgagaattgaagaaattaaaatagtaagcactcagcaaaagcattacctatcactataatttaacacaaatttaaggtaaaagcaagaagacaaggggaaagaaggggcaaccacgggctgccagcagcaagaagcactggctctgctaagccagggttcagaaaactttctctgcaaagggccggatggtaaatatttcaggccttcctggccataaggtctgtgtcacacgcactcaactccaccactggcacatgaaacgagccacgggtaatacatacgtgaatgggtgtggctacattccaataaaattttattcgtggatgctgacatttgaatttcatataactttcccatatcacaaagtattcttcttatgatgtttttcccaaccatttattttattatttttattttattttattttattttattgagatggaggctctctgtgtcacccaggctggagtgcagtggcacgatctcagcttactgcaacctccgcctcccgggtccaagcaattctcagcctcccgagtagctgtgattacaggtgccttccaccacacccagctaattttagtatttttagtagagacagggtttcgccatgttggccaggctggtctggaactcctgaccccaggtgatctgcctgcctcggcctcccaaagtgctaggattacaggcgagagccaccgcccccaggcttcccaaccatttaaaaccataaagtctattcttagcctaagcaacaaaacaaggcagtggccggctaggttgctgagccacatgctacaacacactaggcatacacaggctgcccaactacatttatattcatttgaacagactggtcggctagacaatcaaagtcccatgcgttggatactaccatttaatctcttattttcaacctctagagagagaaagattttaaccaatatttgatgaactgtctaacctacttagtgagaacaagcttcaatttatctatcttagccctggtatttttctatataaatcaattcctaaagcacatatttataactataaatgtcaagcctccactctgagttttgggctcttcattctgcactccaccacacattatgtccaacatgacaaatttatttcattacattcagtaatcaggaatatttccagtggtgggaaaaagccttggaacatatcacttttcagtatggcttcctcattttaaagatatatttttaaaaaatctattaagaggaattttttagaaagcacaaagactttcttaagcaagaatgagggaacgtgagagatttttggagaatttatacttactcattcctcagtacccactttgtggatgcagtattatggacataatgttttcagttttgattaaataattaatgatgtaaaaacaaggtattatttagattctctccaatcaccaggagaacagaacctcaggactccaactttcttgtttttctatattctctaaagcaatttgagaatctcactaatggacaagttgtaaaacttttgtattactgttatcaaaaatgacaagtgatttaccagtatacacgttcacttcactattgtaccctttaagataatatcttccaatttaaacttgatcttggctttgccttttcctatgtattgaaattacattagctcttctcatcagcatccccccgaaagtaagaattaagaatgcaggagcacctatacaatcacagatgttatgagcaggaagaaggtcatcagacaagattccaggaggtgaaacattgtatcagctcagaagagaaccatgatccgtgcaaccaaagactgaaatttttaagcaaaacttcattatggttcttgaaaagtaaagtctaaaaacaacaacaaaccaccttgtataaatgtatattttgctgtttgatcgagcccagagctttttaaatgaacctatgccaggaaacactgatgttcacccattaaaaacaactttttaattgcatgctgctgaattctaatacattccaaatggaggctcctcattctcctttcttcatgcagaaagtgacgactagcttttccaggatcaaaaccagaccagtattcaaagattcgtagtaggacctgggcacgcacatcaaagggacttctctggccttctaccagccacgcctcttcttaaaggcagacaggcagatacctttctagatgataccagggcaccctggacccaatgcccacgtccaggccttctaggggctctttcttagttctgacctggcaaggtagaggacgatgctacgtgtgcactcataggcccgagggcagctcttggtggggattttaaagggggcttctttgtgtacgctgttgtgtccataaaacctttcattgtccaagatggagccaggggtgggaggataaggaaaggtcatggctggggctggcttttccctaccttacgttcccacatggtattccaaggagtctgacaattgtaactctgaatccagctttccaagtcgttatgaaagtctaggccgggcgcaatggctcacccctgtaatcctagcactttgggaggccgagacaggcagatcacctgaggtcaggagttcgagaccagcctggccaacacggcaaaaccccggctctactaaaaatacaaaaattagctgggcgtggtggcaggcgcctataatcccagctactcgggaggctgaggcaggagaatcgcttgaacccaggacgtggaggttgcagtgagctaagatcgcaccattgcactccagcctgggtgacagagcaagactctgtcttaaaaaaaacaaaacaaaacaacggaaagtctatttgtcaaggtgggagaatatattttattttacaatttgttacctggacttacaacttttacatatccagacaaaggttatatgtgcctccatttgtattcttgcccgcaggcctgcttccttccaccaaaaagagaccatgaatacctaactttttttaaaattaaaagctgctagacatataaagagagtccctgatttaggacggttagacttacagtttttgacttgacaatggcacaaaagcaataagcattcagtagaaatcatactttaagtacccatacgcccatgctgtttttcactttcagtacagtacttaatacattacatgagatattcaacactttattataaaataggctttgtgttagataattctgcctaactgtaggctaatgtaagtgttttgagcacatttaaggtaggctaggctaagctaggatgttcggtagattaggtgtattaaatgtattttcaacttaaggtattttcaacttacgatgggtttactgagtcatattctcattgtaagttgatgagcatctgtactcccattctcagaagccatgaaaacacggtattttaaggttaacttggtattgtctgccttgttaaaaagtcgaaaatgaggctgggcgcggtggctcacgcctgtaatcccagcactttgggaggcagaggcgggtagatcacctgaggtcaggagttcaagaccagcctgaccaacgtgatgaaaccccgtctctactaaaaattcaaaattagccgggcatggtggcaggcgcctgtaatctcagctactcaagaggctgaggcaggagaatcgcttgaacccgggaggcaaaggttgtggtgagctgagatcgcgccatcgcactccagcctgggcaacaagagcaaaactctgtctcaaaaaaaaaaaaaaaaaaaaaaagtcgaaaatgatcttcaatacctgatatagtgttgtcatttgtcccctccaaatcccatactgaaatgtgacctccaatattggaggtggggccaggtaggaggtgttctggtcaaggcaagggcagatcccttggcttggtgccatccttgcagtcatgagtgagttcttgctctgttagttcaagtgagagtgggttaagagagactggcaccgcctactctctctcttgttccctttcgccatgtgacatgcttgccccttcatcttctgccatgagtaaaagcttcttgcagcctcacagaagccaagcagatgctggtgccttgcttatacagaaccgtgagccaaataaacctgtcttctttttttttttttttgagactgagtctcactctgttgcccgggctagagtgcagtggtgcgatgtcagctcacagcaacttccccctcctgggcgcaagcaattctcatgcctcagcctcccaagtagctgggactacaggtgcccaccaccatgtccggctaatttttgtatttttagttaggacagggtttcaccatgctggccaggctggtctcgaactcctgacctcaagtgatccgcccactttggcctcccaaagttctgggattacaggcatgagttactgtgcccagccctcgctttaaaaattaccaagcctcaggtattgctttacagcaatgaaaaaccgattaacacagtactttgccagaattattaaaaatgaaaaacgaatgcaacaggctgtccactgacgtccacttctgaggctgcttttgaggcattactattccatgagctcaacaccaccctgtcctccccagcagcatcctctgcctctgcacccagaacacgcccaagagacatggaggctcccagagctgaatgcagtcacatcgagccttataaaacctgtgtgtgtccaaactgctggattccacatgaatgtcgggaatcctctccaccaccactgagaaccatggctaaagtatatctgaattttttaagagaagaatttcagtacctccttggacttcagttgtttgtgaggactgctaaatagccattttctaaagctgagagtgtctgtttgaatgtggagtatcataaaaagtcacttaaggagtggttttaatggaaacagaaccagcactcagaatgccctaaatctttcctgtctttaccactgactgttatactatataataaccatatggcctgcatttccaggagagttccaatttcatgtatcttattacattaaattaataaataggcttatactgattcttaaagattttctttttttaatattttccaaatgttatacaataaagcacgttttttcataatcagaaacaaataaatttcatttatatattatgtgaatatacatttatatttatattctgtgcatacaaaaacccgcatgtgaatgcttatagcaattttattcataattgctaaaactaggaagcagccacaatgtccttcagcaggtgaagggataaataatcaatggtatatcacacaaaggaatattatccggcactgagaagaaatgagctagcaagccacagaaaaatatggaagaaccttgaagacatattactaagtgaaagaagcccatctgaaaaagctacacactgtatgactccaactacacgacatcctggaaaaggtgaagctatagagacagtaacaagagcagtggctgccaggagatgggggaaaggagggatgaacaggcagagcacaaaagatttttagggcagtgaaactaattctgtgggatactatgtggtgaacacacgtaattatacattggtccaaacgcacagaaggtacaacactgagagtgaagcctggtgtaaactatgaactctgggtggtgatgacagttgaatgttggttttctgtttgtaagaaatgcaccagtctggggcaggatgttggtggtgggagaggtgggccaggagtgagagaggaaggggcgtacaggaactctgcgctttccacccaatttggctggcaacctaaaactcctctaaaaatgaaaatctactcattctctctctctctctctctcgctctctctctctctctctctcacacacacacacacacacacacacacacacacacacacacacacactgccagaggagccagggcaaacacacagggctcctgtttatggccacttgcctgaagcagtgggcaatcattccctccacctccttgcccacagccttggtttcttcttccttccatagtataaagtgattctagttgctacccatgagctacaggcattattataaaactagtaagtggggccaggcatgatggctcatacctgtaaccccagcactttgggaggccaaggtgggtggatcacttgaggtcagaagttcaagaccagcctggccaacacagtgaaaccccgtatctaccaaaaatacaaacattagccaggcatggtggcgcgtgcctgtagtcccagctacttgggaggctgcggcaccagaattgcttgagcctgggaggcagaggttgcagtaagctgagatcgcgccaccacactccagcctgggcaacagagtgagactctgtctcaaaaaaaaaaaagaggaggtggggggagaacaaaactagtaattggagctctctggagatgtcactacgtctcagggggctacttctagagaagtgacaaatggccccacacacagatcactgcttgcctccagagagaagcagtccactggggacacggtgccgctgcagccatgtgacaataaggatggctttcacaccagagcagcagggaaaattggacaagaggggccctcggagaccgaggtcatctaaacacagccaatcaccagatacgccacagaggcgaagagaagggccaaccctgcattttctgccacaggagaatgtattgttctctccaactgagaaagcagattgcgttacatttctccacataaatgaacttacacagagggcatgggggtagtaaaaggtgctggacgagagaataaatattgactaaaacatctatcttggggagggggcgcatgcgttcccctggctgtcgcgtgaaaatttttgctttataaattggggaggttattaaaaggacgtgagatgcatggaattaatgaacaactatctgtgaaaatctatcctaattaggaaacaacatgtacatgcctgaaacagcaggccagtagggagggcctgaacagaaagaaaacaaggagcgaaaacaaaataaggctgtctagcaaatgagggcatcattcttcctctagatttaaaattcaacaggaacatggcttttttcctccgtaatggctgtgaaattgattgggatataggctaacagaggtccccagagtgctaaactaaattagaggaagtcttataattacagctagcagttaattattatatgatgggaattgtaatcaaagtaacagatacactattattttccatcttctctgcaaaacacatctaacaaagtctcttaagaggagtagaggggcttgtttgtggttcaacttatgccgattcctactgcccaaaatccaaacaagaacctcgctcctgcaggtgacttgggctgtgacctcggcgcctgccccattcctgcctttcccacgcatgcctcctgccaatcttcaatacattcgcgggtccctctgcctggaatgctctttctctagatttccacggggtctctccctccacgcagacctcaggatcacacctcctgggagaagtatccactgaccaccctgtctaaaatagatacctatcaccccctccatgtttattctcctacctgccccactgtagctcccgaaacactgtctggctctgagttggtcctcaataaatataaaaaataataataataaatgtaaaatgtttaaaattaatataataatatgaaatattatataatatcaattatattatcaattataacaatattatatttaataatattaatataaaacaaaatattgggccaggcgcggtggctcatgcctgtaatgccagcactttgggaggccaaggtgggcggatcacttgaggtcaggagctcaagaccagcctggcttcacatggtgaaaccccacctttactaaaaatacaaaaattagccgggcctggtagcagatgcctgtaatccgagctactcaggaggctgagacaggagaatcacttgaacctggggtggaggttgcagtgaaccgagatcgcgccactgcactccagcctgggcgacagagtgagactccgtcacacacacaaaaaaaatttaaataatattttatgcccttccacttttctaatagtggaaagaaaccaaagcaaagggatccttcgatcgctgtgatatgattgtatttaagcgaacaacattctagcaagacctatattcagaccagcctggaagtgataaagtctgtgttcaacttagcagcagatctttagatgtaacatcaaagaggtaatgaaagggaattaggattttttaggtatcttttatattctaagcactatgtttggctctgaagagatatgatctcttaacaaagaactatcatgcccgtttgtaagtgtcattttataaacagcaaaaaactgaggcagagaagttgttcaaagtcacatatacagcaagtgccaaattcctatacagatctttttgcatccaaaagctctaagggtccatgtttcaaaccgcttccttcctcttttcctttctctcctcttttcctcccattttaattcctttgaaaaaaattcagaagtagaaaccaatatacaaaaatcttgatacctgccacccaaaatgaacatttctaatttaaatcatgaaaatcacattgaccaaatcagctcctggtttaagttgcccaatatccccgcgccagaaatgagataacaggacaaagagctggtgaaacctcattcaaattacaatttatggccatccttcctggcttggtgccaacacgttatgatccaaatctgttagggggagtcttcccagtcaaaggcagctctgtgtaaaacaaacctctctatacagaaagaaacgctttcattccattccagaagtcagaatgtgaagatgctgggctgctttctgccagggcaaaacgaaagacatggaaaacagggaaatgagaagggacagaggcaacaggtctcacactaaccatttacagataacaaaggaacttcagaattcttccctgctaccttgtagaatggatgaaccatggaatacctgataaacttctaagcaagcttcagcctgcccctgtgcagatctgcacagactccaagtacctcccactgccatgggatgtacatggaccaatgtgttggcttccctttgacctcccccctacaacctcccccaacctcccctctgcaccagcagaatgggacccaggggcacaggaagtgcctaatctctgcaagcaaatgtcaatcttcagggcaaaaaaaaaaaaaaaaaaaaaagctttgttctttagaaccagagttgaaactaggttgaaatgaccacatcaattcactaacttgaattcacaaaggaagcacctgttttcagaaaggcgtgtaaaattgtaaaacaatcttactttttatgccatccttctgaatgaagaactgtggataagctgggcctgggggagacctggtcagttttcccacacagtggtaatggtttgtgttactgaagaaaatgtcaaaaattttttcttaaataaaccaccacataattttactccactaaaaatgagaaataacatagccatgggaagtagcccacatcttttgtattctccatcacacttcaaatatctaaacacctgaccaagcacataaagaaatggtggatgtgctatcactgcaaaattccaactgtaggcagaagtttgccatcctcatagcacagtacacagttcccagacaggaaaattctttgtgctccctcagtaaaggagaaaaattatgaccaattacaataacaagggcattagccactttgataaatatctaagcaggcttccgtctgtgcctgggcagatatggagaacgatttagtgtgatatgagaatacagagttgatcacttatcttgtgaaactgaagaagaaagagaaatgtaaacgtcagcatctcttatcacccaggctctgactcttctcaaactattaaaaatagcctttgggatgggcccggtggctcacgcctataatcccagcactttgggaggctgaggctggcagctcacctgaggccaggagttcgagaccagcttagccaacatggagaaaccccatctccactaaaaacataaaataaatagataaataaaataaaataaaaatagcctttgccagaaactaaaaagaaacagcaaagccaaaattaattccacaaggcggaattggttgctttactcatttatactatgtataataaagagtaataaatttctattattataaatcttactttgacattttagatataacatcaatgccccctgagatatactaaaatttgtctataaagcaaggaaattatttttttttaatattggcttggataagttctctctttaaaatttatatgagaatatccttaaatacttcgtgccatttcaaaccgattttgatttaagatatattacaatctattaaagttttaaaaataataaattaacgtttaggtcaactaaattaaataattatatacaatacattattgctttaaatcccaaggcaaagaaaggaaattgcttcttcaggctgacagaatgaattgtatgcatccactgtggggggaaataccttcttcatctaaaagagcttgccccaaaagtttctattgctcacagcaaaggttgcaaaatgtgaacatttctaaaatggaggattttgtgtcttgagatatatgttatagcccaagagatgagtaaaccatagctgttacaaagaggtgttatctgaaattttccaagcttaaattcaatatgacatttagcattattaaaacccattaagatttttgactttgagttgatacaagcgaaatgagtggccccctgcacaaatagacatgcctttccctggatcatcaaagccaatataccagctcataaatgtctctcacaagttttctttattcccctaactcaaataaagctaacttcatggttgccttggaaaacagacctttttcagagaatgttgacactttcattgatttctaagggctcctgatagcgtatgggcacacacatacactcactcacacatataagtcagagaagcctgactgtcagctgtatatgatcctatctaccaaaaaaaacaaacaaaaaaacaaaagctaaaccagaattttaaagaattggaaggaaatataaggggaaatataaggacaacactctttttttttttccttttctttttttgagacggagtctagctctgccacccaggctagagtgcagtggcgtgatcttggctcactgcaacctccaccccctgggttcaagcaattctcctacctcagctcccgagtagctgggactacaggcacccaccaccacacccggcaaattatttttgtatttttagtagagacaggatttcaccatgttagccaagctggtctcaaactcctgacctcaggtgatctgcccacctcagcctctcaaagtgctgggattgcaggcatgagccaccgcacccggccagacaccacactttctgatttataaattagagcagtggcagcacatgctgaaatatacactccaggagagcaagatctttgtggattttctgcactcctatatcccaactgcctagtaaagtgcctttgaatggattttagctcatggaatcctctcaacgacatgatgagacaggtactattcctaccccattttacagataaggaactgaaattcaaagaacttcgttaccaaagtgacacagctggttagtggggcatagaagcctttaggtcttgcccagtcctcttctctgtctttaccatttggttactgtattcctgtcatccagtgacttcaacacacatcagaagtccttgactattaaagtggaatcccggccgggcacagtggctcatgcctgtaatcccagcactttgggaggccgaggtgggtggatcacctgaggtcggcagttcgagaccagcctgaccaacatggagaaaccccggctctactaaaaatacaaaaattagctgggcatggtggcaggctcctgtaatcccagctactcaggaggctgggcaacaagagcaaaactactcttgcctgggctactccagcctgggcaacaagagcaaacttcatctcaaaataaataaataaatgaataaataaataaataaagtggaatcactgcagggtgagtctgcattttttaagtcgaagttaggaactcaaaaagtaaacaagtgcatatgaaaagatgaattcatatgcactaagttaattcaaaagcatgaatgaaagtattttttaaactaaatattcattggtgatgtcatgtatccaatgacctctgcccctagtcagtgttagtaaccagctcttcatcagctacagatagactccagcacttctgtacctcttcctcattctactgtctagacctgaaattttaactgggaaaagctggaagctaacactaggcaagaaaaaatgggccctgccctcctattgtagcctagagccgaatataaacaatggtaaactgttcctctattgggatatggcagccatgtcaatcattgcttcccaacaatcccaccttttggagagcctgcctgggcaagtctgagaccacccatcatacatacacccttgcatcccagcagaagctaagtgaatacatgactcagtattggccaaacagactctcacttaaaaatttggaattaagattgggctcatgcctgtaatcccagcactttgaaaggctgaggctaaaggatcgcttgagcccaggagttcgagaccagcgagaccccatctctacaaaaaatataaaaattagctggtcatggtggtatgcacgcctggaaccctagctactcagggggctgaggcaagaggattgcttgaacccagaagttcgaggttgcagttagctagaaccgcactactgccctccagcctgggaaacaaggcaagactctatctcttaaaaaaaaaaaaaaattggagcccgggcatggtggctcacacctgtaatcccagcactttgggaggccgatgcgggtggatcaggaagtcaggagatcgacatcatcctggccaacatggtgaaaccccgtctctactaaaatacaaaaaattagccgggcgtggtggtgcgcacctgcaattccagctacttgggaggctgaggcaggagaatcgcttgaacccaggaggcggagattgcagtgagccgagattgagccactgcactgcagcctggcgacagagtgagactctgtctcaaaaaaaacaacaacaacaaaaaattggaattgagacactgtgagactaagacagttacctagaggaaaggtcaggtagtattggactagagcaacattgcaccaaatcaaagccatttggtaagcagtaaatctgagatgtcgtcagagaccaaccaagaaagtcagtctgcaagtaggaacaagaaaatggcaaaaccttgcagagaaaagcaaaaattgacactatgggggcctctgagagatgcaggaccaacgtctcttcctgattttcctgctttacaaggcccgcacaaccctggccgtccacgacatttcccatatcccttcagtaacaccatttttgcatgagttcacttgagagagcttcttcacatttcatcataaccaaaagatcccaagaacatagtatttcccccctcagtttctccccgttagaaaaactgactaaaggccgggcgtggtggctcacgcctgtaatcccagcagcacttttgagaggccgaggcgggggtatcatgaggtcaggagagcgagaccatcctggctaccatggtgaaaccccgtctctactaaaaacacacaaaaaaattagccgggcgtggtagcaggcacctgtagtcccagctactcggaaggctgaggcaggagaatggcgtgaacctgggaggcagagcttgcagtaagccaagatcatgccactgcactccagcctgggcgacagagtgagactccgtctcaaaaagaaaaagtgactaaacaatgtatcttcctgtacgtctccaagaagacaggggctcacagcaccacggctaatgtgcagggctcataatcacagaccactgccaacatccctgaaatgccgaatcccaaaaggcagcatgactcagaagaatttgaattatcccaaggttaacagttaagtataaagatgatatacttttttatttttttaagacagagtcttgctctgtcatccaggctggagtgcagtggcacagtcttggctcactgcaacctccgcctctccggttcaagtgattctcctgcctcagactcctaagtagctgggactacagacgcgtgccaccacacccggctaattttttgtatttttagtagagacggggtttcaccatgttagccaggatggtctcgatctcttgacctcgtgatccgcccgcctaggcctcccaaagtgctgggattacaggcgtgagccactgctcccggccgatgacatacttttttaagaaaaaattccatagtacagagaaaacaaaaacaactccccgctgctttttttgaagaaaatctaccaagctctcaggctgtttttcagctattcaggtagcgctacagaacaaggccagtctgactcatgatagctcaaaattataaaataatctaccatggattcagccttactggtttcaaatacacataacatacaaacagatgcccagataaatacataaagaagtgaagctagaataaggaatagtctaaaaattgctgggggctggagaatagagagatcccttctgcttgatgcatcttgcttgatactggaagaaagaacgaggagaaaagtcaaaaaatgaattagacagtccctgccctcaaagacttcctagtctagctgagaagacagtcaccctcacaaatagctcaaatccagggcagatagtgacagaggctaattggaagtctcagcaaagcgtgatgggatcacggaggcaggagcaattaatcacaggcaagccaagcaggcgacacttagccgcaactcacacagggctgtcattgtaaaaggaaatccactctaacagttatcatgaaattgcatccatgatctttgagtcttatcagtccataccttttatctgattaatcgaaatcccacccttttccaggaaaaacaacatttgtttatcattccctccaagagctcttaagatgacacaatgaccttgaattatccttttatctttagaaaatatcctccctctgaaaaggcaacaaaaaagtgaagataataaccccaaggagttcaagaccataaatgaaaataaccaaattgcttggtctctatcccataactgagctgctggacttcacagtccactcaactgtttgccgtgttaaaaatacttaagcaaacagagctatgctaaaaagccatgtgtctatacaacatttattacagtcttagacagaggttctgtccctcatcaaaaaacactggtcaaatcctacactaagtcctattttaaagaggaaaaaaaaaagtgtatgccaagctaatgaaattccagtatggtctttttttttttttttaagagatgggtctctttatattgcccagtctggtctggaattcctaactcaagtggtcctcctacctcagcctcctgagtagctgggattacagacttgagctaccacttccacctatttattgtctgcaattctgtgacttgcattgtgccaatttcaatttcctggttttgataatgcagtatagctaagtaagatgtcaccactggggaaagctgggtggtgggtacccaggacctctctattatctttcaacttcttgtaagtaagtccacaattatttaaaaataaagtttaaaaaaacactcatgacatttatcattttgcagagctctaccaatatccaacagctccctgttcctcctagatcctaatattttgatattggcccttaaaacttgcagatacaggccaggcatagtgggcatgcctgtaatctcagcactttgggaggccgaggcaggaggaatgcttgagcccaggagtttgagaccaacctgggcgagagagtgagaccccctcatctctacacagaaataaaaaaattagccagatatggtggtgcacaaactgtggtcccaagtactcggaaggctaaaggcaggaggatcacttgatcctaggaggtcaaggttacagtgagccatgatcatgccactgcactccaacctgggtgacagggcaagaccgtgtctcaaaaataaataaatgaataaatcacaataacaaaaaacttgcaggtacaattcagcaaacacatgaccctgctcctgggaggggcagccagaaagggcatttccagcacagttcactctcttcaagagtccaagaaagtcaatgtcctcagcctatccccaccctggaccggttcctttgctttgctctgccactaatcccccttcccgagcccacttcccctgtattagtccactttcacactgctgataaagacataactgagactgggcaatgtacaaaagaaaggtttattggacttaacagttccacatggctggggaggcctcacaatcatggtggaagacaaggaggagcaagtcacatctttcatagattgcagcaggcaaaaaaaagagcttgtgcagagaaagtcccatttttaaaaccatcagatctcatgagacccattcactatcacaggaacagcacgggaaagccccgcccccatgatttaatcatctcccactgggtccctcccacaacacatgggaattatgggagccataagatgagatttgggtaggcgacacagagccaaaccatatcacctcccaacacacacaacacagatgggagacatttaaaagtgatattaagaaaagcaaaaccaagtcagagtctccaaccacaaaactcacctccaccttcctaagccttaactctaataaacctcaaccatatttgctttaaaagtataaaagactgggctcctatggaattcaaaacacaagacatactcaaagagattgccgtcatcctaaattcttctcaaagatacacaaacgtgcaagccctgctggtgatcactggcttagcagtgattaatatggctcaacacccacccccaccccactcaacacaaattgagtcccatggcttaaatgttatcttaaaaaaaaaaaaaaatcactcctaacattgtcactcttgagcaggttcccaagataaaatccagacatcattataatttattaaacttttgagaactttaatactaggcctatagagcaatgattaagagaaggaatttgatgctaaagaggtcaaatccctttagctggatgcatatagaacccaccctttaagacctgaataatcttaagcaagttacttaaactttctctataaaatggagaggatgataggattagttagaatcctgcttcattataattctcgggaagattaaataattaatacaaaaaagctttagaacagggcctgccctacagcagcatgtgttgtctattattattactaatgcaataaactttcatcaagcacctgggtcccaaactctacgaatgcaagataaaagaaggcacagccatgattctggaagaatctgcatgttactaaatattcagacagagaaaagtcagaccatgctggtgccaccagcccatcagagctctcagccctgtaggtagaacttacgagtcacaaataaaactccaacaaagcagacatgaaatgtcagtggtatgtgtcactctacccctcctcattcaattttcaccttaaaaaaaatcaacaaactcccaaatacactgccctgtttcacacaaagtttgtgccattagatgagttttttaagttctgcagatcactctattaaaacaccagacataccaataacactgcaactactggccaaaaccattctcctcccttcttgtccttctttcccaggacacttttaaggtcatacaccaatgacatccccaacattcccatgagcaagggaaggattcccgggaaagtgacagctctcactaggaggcagagctccgtgccatattgatgaggttctctcgaaacatctcaaaagcagggatccttgtggtttctgaagtgttgccaatcacacaaagaaagcctaatgcatggttttcaagtcagttttataaaacgattccaaacctctaagtgtgtgaagccaaaattgtaaacgctgctaaaatccctggagttgtttaatattgtttattacgattcctcttggcacctccaaagtctctcatcctgggctcatggagcattttattaatttacacaccatcagtggagttcacagatggtgggaccgaaacacgaagaagcggctcaagcacctcggcaaagatcccaacaacttgtaaataaacatagctctaaaagacccagaagtctcaacctcctctcccaagcactactgctaccactggtgctgaggtgagccactggataccctggttaaaaccaaaagaaagtccgtggctcgacccatcgggagcaggctccagttctaaggttaaggatttcaatactgtccttttcaaatgagtcatttgctcttaatttttttttttttttttttttttttggacagagtctcgctctgtcacccaggctggagtgcagtggtgcaatcttggcttgctgcaacctccacctccctggtttacgcagttctcctgcctcagcctccagagtagctgatattacaggcgcccgccaccacgcctgggtaatttttttgtattttcagtagagacggggtttcaccatgttggccaggctggttttgaactcctgacctcaggtgatcggccagcctcagcctcccaaaatgctaggataacaggcgtcagccaccgggcccagcctaaatcaatccttttaaggatatttaaggaatcagtgaatggctgacctgtccaatgtgcccacagaaggaagtaagagctctttggaaatttgcatgcttgcaattgaaaaggctccttgaaattttgctgtatctcacattgcagaaaacaaatccaaacttagggcaaagacatcagttctgttaaaaacctaggatttacttctacattattcagggtattcttgaagcacctggttatactgtttactatgtgtctgtctatccttcttttgtttatattttagttatttttacatttgtggccaaaatcttacacttgtaaagaaaagagaaagacaaagagaagaaatgagagtctgtcaactgaaaatttaggtcactgacatcaagtggtcatcctgatatcaaggggacaagccaggatggtgaaagatgggaaccactcaggcccttgaattctcttcttttataaagaaaagttcaaattacggactctctttcccgagtcagctaaaaggattcaaaattacaaagagccaaaactccagttttgaaacactcttcctgtttatagtgaataaattccccaaatgcagaggaattagattttaatgaaagtctccactatcatgctattgctcaataacattttggctaaactggcttaacccttcccacaacttagaaaattctgacactctcatcaacgtgaatggggagcaaattcctattcttaatatctaatcacttttatttttcatcttctccccatgtcttagattagttctattttgaggacactgatgagctctgtttactgttctcacacgaagacaatggttctctaagtatggtccccacaagagcgtcagcatcactcaggaactgttagacatgcacattttcgggcctgacctgagacctaataaatcggaaacctagaagtggggcaatctatggtttacaaagcttccaggtggctgtgatgcaacacactttgagtgccaccgctctcagccaccgaaacaccatcacctgtgtcacccacatgcccccccctccaggcttcatcagtgcggtgggtcctaagaatgtctctgtaaacacattgctcccacactcatgctcctcactcccctaaatggcagcaactcagaccttctccttttcttttttttttttttttgagacgaagtctcgcactgtcacccaggctggagtgcaatggtgccatctcagctcactgcaaccaccacctcctgggttcaaggattctcctgcctcagcctctccagtagctggaattacaggcatccgccaccacacccagctaatttttgtatttttagtagagacggggtttcactatgttggccaggctggtcttgaactcctgacctcgtgatccacccgcctcggcctcccaaagtgtcgggattacaggcgtgagccaccacacccagccagaccttctcctttcttagatctgacagtctcaaagttgagttttctcacagactgcccctccaccccacctcctgctccccacatctctctaggttgaggttccacagcccacagtcactccgcacaccgacttcctgctccttggatgccaagcacacaggactccatgctcagctccacacaccagcatcaccacccctctcaaagccccattcagacctccgcaccacaggcccgcttcccttgcagccatggcttgtcccccaagttctgcaaatacacctctgcccctctccatctctcctccagtgccttgcggccttctctgggctggaggaaaaaaatccatgctctcccaaaggcctccctccctggtggggggcaggggacagctggctttttttggctaaaagttctaaccctgtccccaaaagcaatgagagctaggtgaagggcaaagggttaaggaggccttttttttttttatttgggggcttggggttttcttttaagcaggatttataaaggctggctgttgattcctttgagagaaaaaaggagatccaagttttctctggcactacacgagacagccagggaaacgcagcaacatcctgtcctgggaactgactgaagcagttattaaagtcaatggaggcagcactgagggcgtagcagtgtgtgtgtgtgtgtgaggttgtgtgtgtgacagtgtggagagtgtgagtgtacatgtgaaagagcatatatgtgtgtgaaaaagggtgtatgtgtgagtgtgaaacagtgattgtgagtgtgtgtgagactgcattatgtgattgtgagcatgtgtgtgacagtgtatatatttgtgtgggtgtgtcagactgtgtgtctgatagtgtgtgtaatgagacagtgtgtgtgtgagtatatgtaggagactgcgagtgtgtgtgtgtatgtgtgagcaactgtgtgtaagagtgtgtgtgacggtacgtaaatgagacagtgagagtatgtgagtgcgtaagtgtatgagactgtgtgagggtgttacgtatgtgagcatgtgtgagcgactgtgtaagagtgtgtgtgatagtgtgtatgtgtatgtgagagtgcatgagactgagtttatgtataagtgtgagcatgtgtgagcaactgtgtaagaatgtgtgcatatgtgtatgagactgtgtgagagtgaattgagtgttagtgtgtgtcagtgactatgtgtaagtgtgtgtgctgatatgtatatgtacgagacagggcgtgagagtgtgtgtgagtgtgtatgtgagagagacacagagagaaagaaagggaggagagagaggcagagggaggggagagaaaagagagagaccaacagagacagaaagggagagtctgaatccagtcaacgtgagtcctcccactggcaggcagataaattacctggtggtttcctgtgtctgacggcaactaaaataaggcatacaaaagcatgaactcagctgaagtgagagcattaggggcccgctcctcactggacgatgttacaaagagcccctgaaaaacattccatgttacatcacggccacaaggcaagtggctccaagggtgagtgggctcctgacattgaggacaggactgtcctgcccactggggatgatttagaacctctctctgcctcccacctcaatcataaaagcacccccacccccatgatcctaaatgtcctcaaaagggaagtagcaccccacagaaaatgaaactcctgaaataatccaagggcaaagaggagagtaagaagctggggctgtgccttgaacttaaaataataataataacaaaatgcagcaaatattaaaagctagagattttaaatacaggggatgtcctagatttcactgtctggataaaggtgactacagagcagaagttagcaaacttcttgtaagaggccagcaaagaagtatctcaaactccaggagccattcagcatgtctcaaccctgccacagaggtgcaaaagcagccgtggaagataaatgtatacatgtggccatttcccaagaaactttttttttttttttttttttggagatagggtctcactcccttgcccaggctggagtgcaatggcgccatctcggctcactgcaacctctgcctcccaggttcaagcaattctcctgcctcagcctcctcaatagctgggattacaggtgcctgccaccatgcccagctaatttttgtatttttaatagagatgaggtttcaccatgttggctaggctagtctcaaactcctggcctcaagtgatccatccgtcttggcctcccaaagggctgggattacaggcatgagctaccatgcccagccccaataaatgttatttacaaaaacagatgacaggcgggatctggcctgcaggcgggctatggtttgccgactgctgggtatcaagtgtaagaacgtatgtaatgggcaatcggacagcactagaaagtgcatttcgtcagctcttttaaagaaacaagacggctacccaaaggaaaagaaatcgttatatcagaaagacacctgcattttatatttattgcagcaggattcacagtagcaacgatacagaatccacctcggtgtctatcaacagatgactggataaaggaaatgtgatatatatacacaatggaatagtattcagttgtgcaaatgaatgaaatcatgtcttctgcagcaacctagatggaactggacgccgttatcttaagtcagacacagaaagacaagtattgcaagtgctcacttctaagtcggagctaaataatgtgtactcatggctgtagagtgtggaacgatagacaacgaagacttgaaaggatggcggggtgcaaagagggtagatgatgagaaattacttatgggcacaatgtatgttatttgggccattggtactccataacagcagtccccagcctttttggcaccagggaccggtttcatggaagacagtttttccatggatgagggggtgggggatggtttcgggatgaaactgctccacctcagatcatcaggcattagattcttataaggtgcacgaagccaggcacagtggctcacgcctataatcccagcactttgggaggctgaggcaggtggatcacctggggtcaggagttcgagaccaacctggccaacatggtgaaaccccatctctactaaaaatacaaaaattagccgggcatgatagtgcatgcctggaatcccagctacttgggaggctgaggaaggagaatcacttgaacctgggagggagaggttgcagtgagctgggatcacgccactgcactccagcctgggaaagagagcaagactgtctcaggttaaaaaaaaaaaaaaaaaaaaaaaagggagcacgcaacctagatccctcgctcgcatgtgcagttcacaatagggctcatgctcctatgagaatctcatgctgatctgacaggaggcagagctcaggtggtaatgctcactcacaggccgcatacctcctgctgcgtggcctggttcctaacagaccatagacaggtactggtccatggcctggggattggggacccctcccctaaaagccctgacttcaccactatgctgcaatctatgcatgtaacaaaatcggacatgtattccataaatttggaccactaaactaaaatataaagaaacaaaataatatcgtaattctcctttctcagatgcttctgttcctggatgggaagatctccccacatccactaatttgtatctcccttactcctggcttgtgcatgtcttcctctttctgcgtatttcttttttcttttcttttcttttctttttttttttttttttttttttgagacggagtctcactctgttgcccaggctggagtgcagtggcacgatctcagctcactgcaacctccgcctcccgggttcacgccattctcctgcctcagcctcccaagtagctgggactacaggcacatgccaacatgcccggctaatttttttgtatttgcagtagagacggggtttcaccgtgttagccaggatggtctcgatttcctgacgtcgtgatccacccgccccggcctcccaaagtgctgggattataggcatgagccaccacgcccggccctctttctgcatatttcattgcactccattctcccctcagttttgctcctgtctttgtcccctgcgaaaggaatacgattaaattgattatcattctgctccattaaaaaacaatgggtaaaatgtattatctagcattcgccaggcccctcatcacagatatgctgtttcttgataccagctccagatcagatttgaagtcccaggcaaagaacgtgcaaacagaccaaccagatgccatctccttccacagggttccagtgctgctaaatgagatgaagacccagtcccaaagctgtgagtgtgactcagccagtccccccgcaacacgagctggggttacgtcacctgcacaaggtcaacatctggaaagcagcagagcaaccgtcgtgatgggagtggtgcattcttccaagttcaaggcaactgcaaacatgacatttggcggatgacaaaggcctaaaaggagacttaggatttggttcaactctgtacttcattccctaccgcctcaggctctcaggagcccatggattttgccactctgaaagcacaagagagagaattccagagttgcggagaaaaatctttggcaagcctcgaaaatggccagaactcattttctttgtgacagcggaacatacaagctaagggtccccatgtaaaagttcccgtcctcttgtgaatctccttaacaacaaggagcagtcaagtgtccgtaagaaaagcataaatatacagcttatgtacacatgtcttctgcaggtggttttcatcagactcaaaagcgaagctgtcctttttcttctcgaatctaacagtgaagaatcccaaaggatatgaaaagctctcagaatgaatcagccaccactgggaaaagcttactaacagggctaattccaggggccagtggcagatggaggtgggagcaacggcccctttctatgtgtccagtgaacaatcaaaaaagcatcccaggtcagctgaggaccctccaccatttcctcctgtctcttgtccaacttgatgacttccagaactaaaatattaaagagtgtctacgtcaggaagtgacatcaaccagaacaatatgagcctctgaaggacaggtgtctgggcagttggacccgaaccatagaaaaaagaaattctctcttctgttgccactggtgcagatggatgagatctgagaatcatttcctcagcgggcaaaaacccagggaagaggaactggaaaaaggtcacgtccaaacaaatatgtcaaccaaacgaagagagtcccaaaaggcatgggcggacacacaccgcccacaataggagaaagccaccactgatttgaaatcatcacgcactccaaggaacattctcacaaatggcccctgggaaagtttgtgtggtcaggtggttagatggccctaggaggcaggaagtcacagaaagggtgtacccctgagggatggggaatgttctgtgactcttccaacactgagtgtctccttacacctataaaactaaagctagggcaaaatcagcagtccacgtaaaacaaatgggagagcctcagctatagaatgtcttcttacccaacggccccaaagcgtaagagaaaatcccactatcccatataagatgtctctacaaagtgcttagcacaaggtcaggaatcctcagtaaatttaacctaaatttataatgttattggttatcttattaacaacaacaataatattcatagctgccaatgaagcaggtgttccctccagagattaaaaactcagttaccgtctaagcaaacccattgagttcgctaatgaaccactttctggaaatcatagctattcaaaatattctttcaaagtccagtatcccccatgtgcaaacacttgcagtgtctgccccttcttcccctcccatttctaacccagcaatcagggatatgggtgatcagttactgatgctaggacccaatgtcctcattccaactaaaatacaacacactaccttcacccagcttgcttttctctgtcgccacaatttttctctcctttacttctccactatatgaagaaatggtaggattgttgtggcctcttctggttttaccattctcagcttctacacccttttcttcacattgctttgtttccaagggctccatgactccgttttactggtcagggaagataatttgaacgtttgagctcctgggtgatgtggggacaaaactggcctctcattcatttttggccatgacccaacagaatgccttccccacactgtctcctccatgtctctgtctcggccacctcccaggtcaagctcatctttatcctagtttatgaccacaggctcctaacagacatcctgccttctaggcctcctcccaccaaccagccttcccaatgctacccaagggatttctctccaaggcaggacatagatttcattcttccctaatgagaagctttcagtggctttaactttctgttagtaaaattcaagctctttggggttacctttaaaaaggcctccataacgtgacgccagtggggctctctcttctcccctctcgccaaatcctcacaaatcctatataccagccccataggacaactcctctcctattgtgccctgcaccttcaacactccaccatttccctgcatgcctctgccacccgatgcctcccaactctggctagtcttcgaagcaccctgcaagatatgcctcaaatactgtgcattccacatagtgaaatttttttaattttaatagttttgggagtacaggtggtttctggttacatggataagttcttcagtgttgattgctgagattttggtgcagccatcacccaaacagtatacactgtaccccatatgtagtcttttatcccttacccccttcccaacctttccccctgagtccccagaatccattatatcactcttatgcctttgcatcctcatagcctagtgcccacttataagtgagaacatacaatatttggttttccattcctgagttacttcacctagaataatggcctccagctccatccaagttgcgcaacagacatgatttcattcctttttgtggctgttccaaggcaaatatatgccacattttctttatctactcattggctaatgtgcacacaaagtgaagtttaatatccagataaaagtgatcacttgctcagcgctctcaaccactttgcttacatgacacatattaagggggactccttaaactatgttgggacatcatgtagtgggccctaaagtgaatcaaattaacatctgatatgatccaagcaaagatcttggtgtgggaccgaatcaacaagtcaaaggaatgtctttaatggggatgctgcctgtattcatctgttttgacgctgctgataaagacatatccaagattcagtaattattttattttattgtatttcattttattttatttttttgagacagagtttcactcttgttgcccaggctggagcgcaatggcacaatctcggctcactgcaacctctgcctcctgggttcaagcaattctcctgcctcagcctcccaagtagctgggactacaggcatgcgccaccacgtctggctaattttttgtatttagtagagatgtggtttcactatgtttgtcaggctagtcttgaactcctgacctcaggtgatctgcccaccttggcctcccaaagtgctgggattacagttgtgagccactgtgcctggccaactgagtaatttataaacaaaaagagatttaaatggactcatagttccacatggctggggaggcctcacagtcacagcagaaggcaaaaggcacgccttacatggtggcaggcaaaaggaaaaaatgagaatcaagcaaaaggggaaatcccttataaaaacatcagatctcatgagacttactaccatgagaacagtacgggggaaaccacccccatgattcaattatctcccactgggtccctcccacaatacgtgagaattatgggagctacaattcaagatgagatttgggtggggacacagccaaactatatcagtgtcctaacaagcaaaaagcaagcacttgccatcagggacagaagagaacagatgtacacctgcaggtcaattcctgccacactctacctgtgcagtcagggacatggaggttttcaacaggatgaccagggacagtctcgctgaaaaagaaacatgacagaacccacacctgaagggggtacattatgtaactacctggggaagagtgctccaggtagagagacacaggacaagaggcttgaggctggcacttgccatatgaatgagcaacagctgagtggagagagagagaaattgaagatgggaaggggcagctcaagtcagccaggaaccactgtgagcccttcagtttttatttcggggcaattggaaaggcccaaaaggtactgagcagagtgacactatctgacttttaaaaaggtgccctctaggccaggtgcggtggctcatacctgtaatcccagcactttggcagatcacttgaggtcaggagtttgagaccagcctggccaacatggcgaaaccccatctctactgaaagtacaaaaattagcagggcgtggtggcacacgcctgtaatcccagctactcgggaggctgagacaggagaatcacttgaacccggcaggcggaagttgaggtgagccgagatcacgccactgcactccagcctgggcgacagagcgagactctgtctcaaaaaaaaaaaaaaaaaaaaaaaaaaagttgccctctggctactgtttagacacagggtggtgggaaggcaagagaaaaagcagcatccaaatgcaaattaaacagctgctgttttcaggcagggactgaaaacaccagctaccaacttggatttaagaaaatggccaagggtgtccactctcccctaccccggtggctgcagatacaaagacctgcagcatcctggcgagggatgaaaggagagctctctgtagtttttcaggccaactccacagaagctattagaaaggttagcagtaagtgcagcccagctttaaacacaggagttagaggggtcacctcaaatgaaaaggagactgagagacaaccttctcttgggagctcccctggaaacagaggaaaacacaccgccagagaagaaagtcgccctgaaaataccagcgacactggactttgcacagaatcagcttcagagagaggccttttgctgcaagcagggtggcgaggcctcttagaactaccgtttcttttactgcagttgaaggaaagaaaaaggagtcaaggtcacacactcaggtggctttgaagcccagcccccaccgagcggtctagcccagtaatcctaggttgaagatgtgtgcaaattactcttctctgcacctcccatggtctccacgagatctgccgggcacaccagggctggccagtgaccctcctgaaggagcttcagctctggaatcaactcagcctgagaccctggtaactaaactcctccaacctcctcgcttctcctccaaaaatcggtattcagtgagattcacgtatgaagagcactcagcacaaggatggtactcagcaaaggggagttattattgggatcattattgctaattctcttcagctgcacatgaatgcgtgagaaattcatgttaagtaaagtaaaataatggaaacattcactggtaccataagcaatagatgcatcatcattaaacaatagagtgataaaaacaggacagtgacgcaccttgtagagcgatgtgtcatctaaaacatctattcaaggaacagaagactcaccttcagttaaatgccatcctccccaagatcttgatccttcggagatacaaaatcttcagcaacacttacaagtgagctgttaatactagtatgtccagacgctgatgacagcatttaaaaccctctttctggacactaattcagcaataatatgcattagatgcgtttaacagtttaaactctttttccagtaaatctgtgtttaaaatttttaatctaaggatggaataaaagatacaaagatttacacacaaagaagttaatacaccccacaagtagaaaaacaaaagtggaaaacaaaatgatgagcaaaaagaagcaattaaataaactacataacatcctagactgagcgtggtggcttacacctgtaatcccagcactttgggaggtcaaggcgggtggatcacctgaggtcaggagttcaagaccagcctagccaacatggtgaaaccccgtctctactaaaaatacaaaaattatccaagcgtggtggcgcgtctgtggtcccagctacttgggaggctgaggcaggagaatcgcttgaacccgagaggtggaggctgcagcgagccaagatcgtgctattgcactccagcctgggcaacaaaagcaaaactccgtctcaaaaactaaaaataaaaaataaataaactatataacatccttataagaaacttctctgcaatttttgaaaaagcgactttaggaaaaatatctgtcaggagaacctgagctacctgagaacctagcaaatgggcaaggttggatgagatgcaatttcctgactttgccacataataataatgatatgtcatggtatagaaaacaagccttgaaagggacaaaacagctcatagcccaggacagccacatcagcctccatgtctgtaaaaaatacccatgcaccagagccttctcctcttctgttgcatctcctctggacatcagtgaacacaagctccacagaaattccaggaactaatagaaagaaccagttgacctttccagggaggcttacttaagggaaatttgtgaaaaacttttccagtatcccagaccctaaagagtctaaaggtgagtacatgcaataaagcctcgaagcaaagcatatcagattgtccaaaatgatgcaaccatttagaattcattgaattgaccacctgacttgttttactgtggtctacatcactgttagtgttggatgtggttttaaccaagtgtgtattttccaaactttgtccagcagagtagaattgctttcagaactcaaacttctatctagggggtcaaatagggtctccctcaaaatagtgggtcaaatagggtctccccaaaaaattcacatccactcagaacttcagaatgtgacgttgcttggaaatagggtctttgcaggtgtaattaagatgaagtcggccaggtgcggtgactcacgtctgtaatcccagcactttgggaggccaaggtgggtggaccacctgaggtcaggagttcgagaccagcctggccaacatggtgaagccccgtctctactaaaaatacaaaaattagccgggtatggtggcgggtgcctgtaatcccagctacttcggaggctgaggcaggggaatcgcttgaacctgggaggtagaggttgcagtgagtgcagtgagccgagatcatgccactacactccagcctgggcaacagagtgagacttcctcttaaaaaaaaaaaagaaaagaaaagaaaaaaaaagatgaggtcatactgaattagaatggcccctaaatccaatgactagtggcctttaaagaagagaggacatacagagaaggccaagtgaagagggaggcagtgactggacgttgcagctacaagccaagaaatgctaaagattgctaggagccaccagaagaagagtcgggaagaattcctccatagagcaggggtccctaaccctcgggctgctgaccgataccagtctatggcctgttaggagctgggccacacagcaggaggtgggcagtgggcaagcgggtgagcattaccacctgagctccgcctcctgtcagatcagcggtgacatcagattctcataggagcatgaaccctgttgtgaacggcgcacgcgagggatctaggttgcgcactccttatgagaatcgaatgccgatgatctgagatggaacagtttcattctgaaaccttgggtccgtgggaaaaactgtcttccatgaaacttgtccctggtgataaaaagcttggggaacactgccccagagcattcagaaggagcatgccagccggctgcagtggccacgcctataatcccaacgttgtggaaggccatggcaggaggacggcttgaggccagacttttaagactagcctgagcaacacagtgagaccctatctctacaaaagaaaaaaaaattagtcaggcatggtagtgcacgccagtactcctagctactcgcgaggctgaagcaggaggatctcttgagcccaggaggtcgagactgcagtgagttataatcacaccactgcactccagtcgagttgctgcaggtaaacaagagttccataggcctagataggtgacagaatgaccctgtctctaaaaaaaacaaaaaacaacaacaaaaaaaggtagcatgccttgccaacaccttgacttcaggcttctggcttccagagaactgcgagagaatatattcctgttttcgtaagccaccaagttggtggcaatatgtgatggcagccctagaaaactaatacaacctacatacaaaagtctcaaagtaaagacaagaaaatcacacaaaagagggattattgagaggagagaatattaagaacacatgttactttacagctccgtctcaggatacgtatcaaggatggaagatactcctgaagaaatgctgaaagctaaaattaagattttataagcagttttcttgttcctctgagcagtggttccgaagcattggtgtgcataagcgttacgtggcaagagcattagagtgcagactcccaagcccccacccaagatcctgatgcaacagatggtatttttaacaaggaaccctagattccagtgacactggcctcctgatcacatttacgagaagtctgttgggagctgaacatacatataacaaaaacatcctctggggatgttcatcaaactccctatccagcaacccaaaaccagatgaccccttgatgcctgcgctcacaccatccacgactgccaccagcaatgtcctgtgcctccacctgcactccacctttgcaccaatgagcacctctcatgaacacattgagtatctttgtacctttgctcatgatctctactcaggggttcctctccctgccatggacatattggctttctaaagaaagtttgttcaccttccaaaatcccaattaagcatcattgctccgtaaagattccctagcatgcttaagggagaatcatccattgctcctgcagcacactggaccagcctgcagcatagacagctgtctgccccatgacatggggcgctccctacaggcccagtctctctctctctttactgtatcactgtatcactgtcacacagagtcacttaaaagtcacttaatacacactgattgagggggttcctgataagagaactgtgaacagcactatcttttttttttttttttttttttttttgagacggagtctggctctgtcacccaggctggagtgcagtggcatgatctccgctcactgcaagctccgcctcccgggttcacgccattctcctgcctcagtctcccgagtagctgggactacaggcgcccgccaccacacctggctaattttttgtatttttagtagagacagggtttcaccatgttagccaggatagtctcgatctcctgacctcatgatcccctcgcctcggcctcccaaagcgctgggattacaggcgtgagccaccgcgcccagcctggcactatcttgaagatgtgaaataaaagtcaagagtagcctaccctcgctgtccctgccccatcattatacacattcagagaatccacagtttctccattatagaaactagcacacttgtgattaatatcagcatactaattcacttaatgtccatcttccccacaagcctgtgagctctctgcagccaggggctgtgtctgctatttactgctgtacctctaggccctagccctataacgaactcatggtgataaatgaatccttcacatgtgagatcatttggcatcctagaaagttgtaaaaaaaaaaaaaaaaaaaaaaaaaaaaaccttgaaaacattatgctacgtgaaagaagccagtcacaaaagaccacacattttatgatcccatttatatgaaacgtccggaataggcaaggccacagagaaagaaagtaaattaatgattatcggggggggcggggggggggtcaagggagttggggagaaatagggaatgatttggggcatgatgagagtgttctgaagttgattgtagtgatgattgcacaacactgagaatatactaaaaaaccactgaattatacactttacgtgcatgaattgcacggtgtgtgaattatatctcaataaagctgttaaagttatagaagttctgctgttacagatacttgaaaattaagtttgctcagaaaaggaaaatggtctaattgggagaaaccatggaaatcttttagaagacgcatggtcttctttctttttcatttttaatagatgcagattcggttttatttagtatcctgtaactagagcttaaatgcttgtgaacatctggtctgagctgctcatttctaaagaaataaaaactgagactcagaagttcagtgatttgtctacgatctcacagccagtgtgaggaagcttaagattcaaactcaatcacagctattcacagaagaaaaagggtggatttgtggatgccatccaagtacccaccaacaggtgtgtggataaacgaaatgcggtgtagacgttccatggaatattattcagccttaaaaggaaaaatattctgacacatgctacaatatggatgaaccttgaagacattatgctaactgaaataaaccagttgcaaaaagagaaatcctgtgtgcttccacttatatgaggtacctagagtaccaaattcatagagaaggaaggaaaatggtggttgccaggggctgggggagcagagggagaatgtggagtgattatttattaaacacagagtttccgtttcgcaagatgaaaagagttctggagactgcacaggaatgtaaattaactgtactgaactgtacacatcaaaagtgctaagatgggctggcgcagtggctcacgcctataatcccagcacttttggaggccaaggcaggcggatcacttgaggtcaggagttcgagaccagcctgaccaatatggtaaaatcctgtctccacttaaaaaatacaaaaatgagctgggtgtggtggtgcaggcctgtaatcccagctactacagaggctgaggcaggagaatcgcttgaactggggaggcagaggttgcagtgagccaagatcataccactgcactccagtccaggcaacagagcaggactccgtctcaaacaaaaaaaaaaaaagaaaacaaaacaaaatagctaagatggtgaattttatattattttaccgtaattaaaaataaacaatttttttaaatccaaagtcaagtctcctaactctcatcctgaactctcttccacggtggcccttcccggacccagtggaatgcacagatggaaaggaaagcaggctgcttgctcagacttcacaacggagaaatcagagaggcccaagtcactgcttccaaggaatttcgagaattttaacaaatctcagcaggagcaatcagtacacagatcaataaaatggaggccactccacaggtctgagtcttcccaaaacgcagccctgccaagaggtaaatggatggcagcaaaagataatctggtattgagtgccaagcaggttagacagcttctcagacttaaatgagtttaagtcaactagggatcttgagattctgtgattctggtttagttggtctgcaattacgcatttctaacaaactcctacatgatgctggtccagggactgctttttttttttttttacatttttatttcaattccctccctccctccctccctccctctctccctctttctttctttctctctctctttctttctctctctctctttctttctctctctctcttcctttttgagacagagtctcgctctgtcgcccaggctgggttgcaatggcgagatctcagctcattgcaacctccgcctcgcaggttcaagcaattctcctgcctcatcttcccgagtagctgggattacaagcacatgccaccacacccacctaattttttgtacttttaatagagatagggttttgctaatttttgtatttttagtagagatgaggtctcgtcatgttggccaggctggtctcaaactcctgacctcaggtgatccacctgcctgggcttcccaaagtgctgggattacaggcgtaaaccaccgcgcccagaccattttaatagtttttggggatcaggcggtttttggttacatggataagtcctttagtggtgatttctgagattttggtgcacccatcacccaagcagtgtacactgtacccagtatgtggtcttttatccctcacccacctcccacccttcctcctgagtccccaaagtccattgtatcactcttatgtctttgcataagggcccgctttttaacactttgagtagctggcgtagcaatgaaactacatcacattccttaccccaaatgagaagccaccttctcagacttggggctccatgggatcattctattttcagtagatctaagcacacgatgacaagccaacacatttcagctcactttaggttgagttagaaaacatacatatttcacttccacggtttgtgaaaatgaaatcttcattatgttaaaatcaggccagtggattggttgcttgattgcaggggaaggaaagaaaccaactgtggtctgtttctaaaggaaatataaaataggacttaaaactcagaagtcagtggaatgtggtctaataactgattcagaaactcactcaggtcccttggtaagccacaatgtcaggagctacaactgaaagagagcccaaacattccactttgcagagagtcatagcacggtttttttcaactttggttttcatgaagtctggggtttcatgccagttcttagtgaaaattaacttgaaagaaaagtcatcagaacagcaagaaaaagcaatttgtaaggcccagagcctcatcaaccaacaagacagatgctataaagacaagcacttgagggaaattagaatatttaataacatgctatgtttttgaggggcttggggtgggtgtttttagtttttatttttattttattattacttttttatacatagtgtttgttgcccaggctgaagtgcagtggcacaatcatatctcattgcagcctccaactcctgggctcaagcaatcctcccacctcagcctcctgagtagctaagactacaggtgtgtgccaccatgcctggctcatgtcttattttctgtaatgacaagatctcgcaatattgcccaggttggacaaattcctggcctcaagcaatcctcccgccttggcaatatactatgtctttaagattaaaggtcatcgaccgggcacagtggctcacacctgtaatcccagcactttgggaggccaaggtgggcggatcacgaggtcaggggatcgagaccatcctggctaatatggtgaaaccctgtctctactaaaatatgcaaaaaattggccgggcgtggtggtgggcgcctgtagtcccagctactcgggaggctgaggcaggagaatggcgtgaacctggaaggcgggggttgcagtgagccgagattatgccactgcactccagcctgggggacagagcgagactctgtctcaaaaaaataataataaattaaaataaattttaaaaaagattaaagatcaccaattaaaattaaaaacatggagccagacgcagtggctaatgcctataagcccagtattttaggaggccgaggtcaggagttcaagaccagactgggcatcataacgagacctcatatctatgaaaaattttttttaaaaaattaaaaatagctaggtgtggtggtgtgcacctatagtcccagctactcaggaggctgaggcgggaggattgcttgagcccaggagattgaggctgcagtgagctgtgatcacaccagtgcactccagcctggacaacagagcaataccccgtctcaaaaacaataaataaatttaaatacattaaattaaaagcagtcttcttgtagaaagggaacgaaaaactttttaaaaagagaaagcaaataatcaattccttgcaaccaaaaaccatcccaaaaatcctctatagaaactgaacgcggccaggcgcagtggctcatgcctgtaatcccagcactttgggaggccgaagcgggtggatcacctgaggtaagaagttcgataccagcctgatcaacatggtgaaaccctgtctctactaaaaatacaaaattagccaggcctagtggcctgtaatttcagctacttgggaggctgaggcagcagaatcgcttgaacccaggaggcagaggttgcagtgagccgagatcacaccattgcactctagcctgggtaacaggagtgaaatcccatctcaacaaaaaaaagaaagaaagaaactgaatgtggcaaactaactctgcaccaaataagcttctaatttccactgcacttgttaataccccttcctatatatgtgtcagctaatttaccttctggttttattgttattatgattagtaagtccccaggacaggagagggtggtatacctattactcatgatatacattaagcgattctctcgaggttcaaagccactaatgtttacttgttgcaaagtcaatttaattaaatatatatacacaaaatacacacaactcttccctttaaaggctggaaataaacaattcaaatggaaacctcaagatgtaaaaggagagacctggcacagtggctcatgcctgtaattccagcactttgggaggtcgaggcaggcaaatggcttgaggccaggagttcgagaccagcctgggaaacatggcaaaaccccacctctacaaaaaatacaaaaattagccaggcataatggcacatgcctgtagtctcagctactggggaggctgaggtgggaggccttcttgagcccaggaggccaaggctgcagtgagctgagatcacgccactgtactccagcctgggtgacagagccagaccctgtctcaaaaaaaaaaaaaagtaaaagtaaagcagatacagtgctcagcactatccaaggtgaggtaagataacatgcttcatatcctactctggtggcagaattgatacaacctaactttgtttgtttgtttgtttgtttaaggcagggtctcactctgtcccccaggctggagtgcagtggtgcgatcatgcctcactgcaacctctgcctcctgggctcacaccatcctcccacctcagcctccccagttgctgggaccacaggtgtgcacatgaccaggcccagctgggttttgtattttttgtagagacagggtttcattatgttgccgagcctggtctcgaactcctgggctcaagtgatccgcctgccttggcctcccgaagtgttgggattgcatgggattgcagacgtaagccacagcactggccaacctacctttgtggaaagtaaattggcaacatctaaagactcaaaaatattcagaccctttgacccattaattctttttctgaggatctgtcccaaggaaatgatccaagatttagaaaacgttgcacatggaaaaaaaagacatccactgcagtatttcctaagaagagaataaaaattggaaatacaccccggggaggcggaggggtgtgccctgccactgtagctaagtgggacctcatttcccagaattccctctcctggacggcagggagtgagtggcagccatgggggagtttgcacagtatgtgaaggcaggaggggagaagcaggtcaagcagagttaggcgtgggcgcaccacctgtggctgcagcctcccacagtcccttgggctcctgggtcaggcactgtgcagtccaacagccagggcgtggagtcttctgtgcaccgctcccagtcatccagatgggaagtggaagaaacagacatgggctccaccgcgaactggctccgctactccacatgttacttttcttctggactcctggcccagccagaggcagagacaacagtcttccacagacttctttcagctcccaaagttgcacagggggagccgggagtggtggcacacgcctgtcctagcactttgggaggcctaggcaggtggatcacttgaggtcaggagttcaagaccagcctggccaacatggtgaaaccccgtctctactaaaaatacaaaaaattagccaggcgtgttggcgggtacctgtaatccggctactccggaggctgaggcaggagaatcgcttgaacccgggagatggaggttgcagtgagccgaggtcgcgccattgcactccagcctgggcaacaagagcgaaactccatctcaaagaaaaaaaaaaaaaaaatatatatatatatatatatatacacacacacacacacacacacacacatatatatatatattgcacagtggggaatccccatgataaatccctctgccatgcgcctcaccgaacccaaactgataattaccatacatgcaaacaagagctaagtaaaccccagtgcagcacccatggaataggaaacacttgttaaatgaatatttacaaatgatttaaggccacctgcaacacaaccatttttaccactaaatgggaaaaacatcaagctagcgtttatacttatgtattatgtataataaacaaagaccagacaaagggggaaaaaagatgaaatcaaagtatacctgcaaaataaaaatagtttcagtctaggctgaactgagttagcttttgattcttccgttcttaaagttttctgtagattttctgcatggatttgttttagaattaaaattctctgaagattttgtatgaatttctaagaattaggttctaaattctttattgttttcttcatttaaattccttattgttctgtatcttttcctccactctcaccttagattttgagtctatcataaagtaatttttctaatttaaaaaagcctctattttttgtatatatgtaacagaattgcaaatatgattacttcatttcactgctaaaaacatctttggttgttttccagaagaaaagccaaacttcttggcatgatctggccactgatcttgccagcttagctcatcttataaccctgacttaagaatatgtaatagtaataataagaacataatgacaataataataattctcatccccagaggtgaccaggccctttgattgttctgtacttctgcatgtatgggtctcctggcttgaaaatgctttccttctcccccttatccactggaagaacaaccactcatcatctaagacttaacttgaacttggctcatctgaagacctacctaattctgcaccgccttcaacttcacctcccaaactactctgagatgcactccacgtatgttcagtagctcttaccagactgtactgaatgtgtccatctctccagctgtagggcttgttaaacctctagttgttgggctatacccctagaatttctgattcagtagattgggggtggatgggggtgggcaagaatgtgcatttctagcaagttcccagatgatgctgatgttgctggtctgggaaccacagtgggagaaccactgagctagactctgagactcttgaaggtggggacttttattcaatgttgcatcctaaggcccaagaacagtacctgacacttactgcaagattggtcagaaatcattttatttattttactttttaaaatacagtcatatatagtcacacatcacttaacaacagatacatgttctgagaaatgccgttaggcaattacgtcactttacgaacactagagagtgtacttagacaaacccagatggtacagccttttgcttgtaggccaaagcctgtacagtatggtactgtcctgaatactgcaggcaacagtaatacaatggtattcgtgtatctaaacatatcccaataaagaaaaaaatacagtcaaaatatgagatcaccgtcatatatgcaatcttatgggaccaccatcatgtatgtgatcccttaaccgaaatgcaacatgcactgcaaaatgactgtaaacaaaatcctttcccatacacatggctgccatcactagaatgccacatcgcatgctatgcagagttacatgccatcttacaactaattccttgatcatatctttgtgaaatctggaaaccttaataaatatggggtgaacatgtcaaaaatctaagattccttttttttttttttttttttttttttttgagacggagtctcgctctgacaccaggctggagggcagtggcgtaatctcaactcactgcaacctccacctcccgggttcaagcgattctcctgcctcagcctcctgagtagctgggactacaggcacatgccaccatgcccagctaatttttgtatttttagtggagacaggatttcactatgttggccagcatggtctcgatctcctgacctcatgatctgcccgcctcaggctcccaaagtgctgggattacaggcgtgagccaccacgccctgcccttccatactctttattctgccactgcgtttctacctctataatgatgacaggctggcagtaccaaagcgaggagccagagttgggtgatctggcctgctttctaaattaccttcctggtaatagtgaccatggccttcccagacacactctccggccagtttgtgaaaaagccataggaatgcagagaagaaaagcaactccacttgtaaagactggaaagatgcggcaacatgcatgaagtgggaggggaaggcacagtaagaaagattttccagggaaacagtagaaacaaacacaggggtgttaaaataaatgacatgcccctgcagtgtcaggaaatgtgccttgtggatgaaatagaatgtgtgatgggagacgggagcagaaaataatttggggccagactgtggaaggtctgaagtgccgtatcacaaagatcagactttaatctgtatgtggtcgctcccgtcaaaggggagtggcaatgatcagaattacatgtcggaaaacaactctaatggctggatgaatgataaaaggggcattggaggggacattctgtgcattacagataaagaaatgccaaatgaaactgcaagggaaacatgtaacaaatttaaatgtatgtgggtatgtctttatccaacattgaagtaatggccttttgtgttctcttttcagtctctctcatttcatttccaaaacaacataaggtagataaataaccaattgaagcaataggtactagagaaattgaaagccagagctcttcagagcaggggagtcacccaagccttcctagatttgatcctagcctttaaaaagtaagaaagacttcaccagtatgaatgatgccatttatagttattggtatcatttagagctatgcagaagagctaagtttgccttgctctttacagccaaaatcttctgaaatgtgccttaaacccaaattaacatcattcaggtgattaggttgagcaaactgggtagaaggagaatgaaaacgaatacatcagttatgccatttgcagatacaacctctgaaagtaaatggaataattagatttatacttcaactgcaataatgctttatggtccattcttttagttggaagctagggcaatgcataccaaactctggaaactcaaatcattccttttagaacaatttctcagaatataagaagaaaaggaagcaaattaaaaaaaggattgatcccttggaggctgagagattttaattatcctttaagatgagggtggtaattgacttatactctgaaacatcttaactcagcgctcatacacagacacaacttaatgatcagattgtcagggaatacgttattccacacatgtgaatttaccacataactgaaccttaatatttctaaatgtccttttttttttttgagacgaagtctcgctctgtctcccaggctggagtgcagtggtttgatctcggctcactgcaaccttcacctcccaggctccagcgatcctcgcacctcagcctcctgagtagctgggaccacaggcatgtaccaccacacccggctaatttttgtatttttgttagagacagggttttgccacgttgcccaggctggtctcaaactcctgagctcaagcgatccacccacctcggcctcccaaagtgctaggattatagcaaccgtgcctggcctaaatgtccaaatatttgtttaaatgtgtttaaatccctatttttaaagaaaaaaaaaggcattgtaaaatatattgcagaacttctacatccagctaagatgcagtaacaaggaccagatttatactcccacctgaaacaatttaaaaattggacaaaatctatgaaacaatggttttcagacactgaacaacaggtagcacaggacactgatctctaacagactaaataccaaacagatgagcattacgatctgccccagtgtcccggctgctaggccttagcacagggagagggaactcgagcagaatctgtggtgccctggagttgagaagttgaagctgaaatagataaccatgccaccatttgaaatgggcatgctaaagcgtttgcttcttgatggcaaatggtcacttgtatactatgttatgctcgaatattgtgaagaccatggttaagagctggaaagatctcttctcaatactgttaaacttttaaaaattcagacatgctcttataatgaatttttacttcctcacttcctaacaggccatcactgcaactaaccacaaccgtgttttaattgcagttatagttaattgcaccttccatcttttgagtcccaaacgcgatagctcagagtgtgtggacaggctctaggtgagacacacagtgaccctccagagtgaagcactactacaaggactgtggtgagctctgtgttaacagcttggccgtcccagttctctgtaatgtcccacggagacttttgccaacaagtgacctctggcctggcactcagtaggcatgcaatgaataaccactgaactaattaattacttagtaaacgaatgaagtattatggttaaaagtctcaggcagcatgtatcctctttgctaaattcatatgctgttcatatttagatcagtctgaacagactacggagatgtctttggtactgagcagattcttggcttccttccctaagagtgatccccaacattcttgccaagaacttcggggccactggccacaccacccctttgcctgaactgaacctgtttgtaaaagaacactggaacccacattgcacaccagcagtctcagccttcatgtctttaaaactaacatcctgcttcattcaagttagtctttaaaatgctcttcgtcttcaagtttaaggcaagaagataaaaagggtttactttatgcacccaggaattactctaaagatacatgcttatagagtaactttaaagttactctaaagatacatgcttataaggtcacaagatgccttgtcaattgttgtaaacaagattttaattaattccaggaaattgatgaatctaattttcatataaaaaggcccagtggaatttgagccctgaatcattcatacacgtttgctgcatgtagtactaatgacaatagtactaattttcattcacacagcaacttatagattatgggatgaaactaagtaggcagctcccattcacattacagaaagcaaatgaaaaattggcctagtgtttcttggccccactttggttcataaacttctacactgccatcaagatctgccatggtttgaatgtgttccccaacattcaagggttagaaatttaatctccaatgcaacaatgttgagaggtgggacctttaagaggtaactaggtcaagagggttctgctctcatgaatggattaatgtcactgtcttggaagtgggttcgttataaaaacaagctcggccctttcttgttctctctcactctctctcaccatgtgatgctttgcatcagggcagcaagaaggccctcaccagatgcagccccttgatcttggacttcccagcctccagaatcatgagccaaataaccttatattgtttataaattatgcagtctgtggtattttgttatagcagcccaaaactaagacaagatccttcacatatgccacctcctccataaagcctcattttatatctgtgaagaaacttggctattcaacctctattgtcccatagaactttgttctcatccctacagcaacacttactgcactatggtgggatctatctattcatttatcagcctccactatagactgcaggctcccccaaggacaagcaccacgtaatatacacgtcattcaatcaccagtgtccaccactgcctctggcacatggcagccacttaataagcaaaggactcttgttcccaaaagataaattcatttatctaaagtatacgccagagccaggtgcggtggctcatgcctgtaatctcagcactttgggagactaaggcaggcagtcagcagtttgagaccaacctggccaatatggtgaaaccccatctcaactaaaaatgcaaaaattagccaggcatggttacgcatgcctgtaatcccagctactcaggagactgaggcacaagaatcacttgaacctgggaggtagaggttgcagtgagctgagatggagatcacaccactgcactccaccctgggtgacagagcgagactcggtctcaaataaaaataaataaattaattaattaatttaaaaaaatataggccaggagcagtggctcacacctgtaattccagcactttgggaggccaatgcaggcagatcgtctgaggttaggagtttgagaccagcctagccaacatggtgaaaccccatctttactaaaaatacaaaaatttgctgggtgtggtggtgcatgcctgtgatcccagctactcaggaggctgacacaggagaatcgcttgcacccaggaggtggaggttgcactgagctgagatcactccactgtactccagcctgggtgacacagtgagattccatctcaacaataaaaataaaaataaaaaacgatacaatataaaaccttcgccactgtagcaaactctgaaatatttacatttttcttatctcaaaagtaatgtctttgtaaaagaaaaaatttggtaaaatatcacattatggagaaaatagttctccactgttcaaactataggtttccggtctatttttaatgtaaatatatcaaagttaagctcatattatacatagttattgatctaatttattttatatccaatatcttaaacatactcccatgtcactaaaatattatggctgggcacactggtgcacgcttgtaatcctaaggattgcttgagcccagttcaaaaccagcctgtgcaacatggtgaaacccatctctactaaaagtacaaaaattagctggacgtggtggcaggcacctgtaatcccagctactcagtggggctgaggtaggaggatcaattgaccctgggaggttgaggctggagtgaatcatgattgtgtcactgcactctatccttggtgacagagagagaccctgtctcaaaaaaaaaaaaaagcaactacataatagggtggtatggtttggatttgtgttcccacccaaatctcatgttgaattataatccccaatgttggagaaagggcctgtgggaggtgactggatcacgagggtggacatcccccttgttgttctcatgacagtgagtgagttctcacaagatctggttgtttgaaagtgtatagcacctccaccctctctctctcttccacctgctctggccacgtaagagttgcctgcttcaccttctgccatgaaagtaagtttcccgagatcccccagccatgcttccagtatagcctggagcaccataagccaattaaacctcttctctttataaattaccaaatttcagatatttctttatagcagtgtgagaacagactaatacgtatggatattccataacttacttaaccatttctttctttttggacagttagatcacctctggtagttgaacattcaaaaaattatctcagcttgctttcttaataagaggttaacccttccaagatgatgctgcaggaattcatgaatggagcagctaccctcatcaactactttttactaaccccttaagcacaagacaacaaaaggtcccaagacgtgaccatgttactaggccacacatacatatgtaattgcgtatttgtgatcttttttttttttttttttttttttttttttgagacagagtctcactgtgttgcccagactggagtgcagtggcatgatctgggcccaccacaacctccacctcccaggttcaagtgattctcctgtctcagcctcccaagtagctgggattacaggcgcctgccaccatgcccagctaatttttgtatttttagtagagacagggttttgccatgttggacaggctggtctcgaactcctgacctcaagtgacccacccacctcagtctcccaaagtgatgggattacaagtgtgagccactgcacccagcatatttgtgatcttttccatgagctgacagtctgtgctgtgtttgtcaaatagggcactggagagaatgaaaagatctgtgcacaaacgtaccatcagctcacctgtcatgatgtaacccttttccctctttttcttgcatgtgtcctgctctctcccccaagtcctcttttgtatcccacttcttactaccaactacctgttaagaaaccctccaaaggtcaaaagtctctgtctcagtgctattggcattttgggctgaataattcattgtcacagggaaagagagaagttctgtgcattgtaggatgtttggcagcatccctggcctccatccactgggatgccagtagcaacccacaacaaccccactatgacaaccaaaaccaactctagacattgccaactgtctatctcctagaaggcagtttcatccccagttgagaaataataatctaaattgatcatttacttatttgataataaacgcaagaaagagatccactagagctgtgagaattcagtttcaattacattaacatgctgactataatcactaggtagcgattacctgatgtcatgcaggggaaagtgctatcgttgattggggatgtctgccacaggttggggaagggcagcctgccatccccaccacctcaccagaggcagctgaacaggaacagggggtagccacagtgattaaaactagacttggccccaagagacccagacccaataccatctttccttgaacccacagaagaataacagaaaccttaaaagcattgtattctttgtttttgttcgtctgtttgtttgagatggcatcttactctgtcgcccaggctggagtgcagtggcacgatctcggctcactgcaacctctgtttcctgggttcaagcgactcttgtgcctcagcctcccgggtagctgggattacaggcatgcaccaccatgtccagctaatttttgtatttttactagagacagtgtttcaccatgttggccaggctggtcttgaactcctgacctcaagtaattcacccgcgttggcctcccaaagtgctggcattacaggcatgggccaccacacccatacagtattgtattctttaacatgcatttgattataacatcctacgaaatgatccccagaagaaactacagttgaccagtcattaatatgtataagcttcctattctatccaagcacgctgtacgccatcaaaggctggtaagaaatagaacttactttacccgcatcctcaaaaagttggcagcactgagtgctaacccagaaaccataattatcgtgaaaagaaatagaaccactttctgctgaaccatgtaatctatgtttaaaaaagagggaggggtctctcgaagaaccactggttgtctaagaatataacagctagtgtagaacaaaccagactgagatggaacaaaaccatggatggctgatgcttccgattgtcaatagggtcttgatcaccggcaatgtaaccttgcagttacctaacctctctgtgtctcagtttccctcgtttggtaaaacagggaaaaaatagtactcatacctcctagtgttgttaagatgaagaaataagagaataacaaaagccatatgcagtaagtattctacaaacgttagctaatattgtgtgatgtcagaactatattcaatcgagaaagcatccaacagcttgtgtcatatttgccagcagcgtagcaactgaaggtgttaagaaatgagaaactcagaaaaagtctcactcaaaggctgtattcacaatctagctttcccttataatttcagtgtgctcaaactacatctcatgcaggtccaaatatttcttcttacctagtccttagtggaattaagaaaatctgatcaccacactgctgactcccccagtccccaaatatctgattatagcctaattcctgacacaaaataaacctaaattcttggcctttaaaaaaaagtcacaacacaaatgaccaagttaatacagatgctatcagggttgtcctggtcccagatcagtgattcttagcagaataggttaagaaaacctttagatttccaatggattgaaagacaaatggctgggcatggtggctcatgcctgtaatcccagcactttgggaggccgaggcaggcggatcatgaggtcagagcatcgagaccatcctggccaacatggtgaaaccccgtctctactaaaaatacaaaaattagctgggtgtggtggcgtgtgcctgtaatcccagctactggggaggctgaggtgggagaatcacttgaaccagggaggcagaggttgcagtgagcagagatcatgccattgcactccagcctggcaacagagtgagactgtttcaaaaaaaaagaaaaaaagacaaatgaagtggtaaactgtccactttaattagttgcaaaggaaaacatgcatttacattttctgtgttccccattctagttcccagcaccccatcgtggaaggaaacacataaggtaatatctcagtgggttcccagagcagaagagtcacagcaagatgattatggtgcctatttaatcagctggtcttaacaggtcaccatgcttttatgaactcaggatatgggaagaatcctttgtgattttgctggttcaatttctctcttcatcttagagggaaatgcttgcctttttccatgtgaaagctcacagcacaacagaatcatggcccattagggttggaaggaacttagcaaatattataaacagcatttaccaaggtgtggcccaagcatccccctgcataagaatcacatgtgacacttgtttaaaatgcagattcatgtgttggtattcaacaaactcattccttcttaaatgtggctgcatggcttgactctagccaataaggaatgtgagtgggaaagatgtgtctgcccctctcacaaacctgcaagcactttccccttctaggacttgagtcccaggaatatggcaatgttggaaggcacaagttggcgatagcagagccacaatatggaaggagcctgggtcctggaatcaccatttggtaaagaacttttatgtggacaagaaataaccttttgttgggttaagccactgtaatttcagactttgttccaggattgagccttccctacctaacatacaggcttcctatcttagacatagcaagtaagatctggaggtcactgaagaaaaaaattgacacttgttaaaagagtaatgaagacttaattcaaaactattgctgagcatggtggctcatgcctgtaatcccagcactttgggaggccaaggtgggtggatcacttgagcccaggagttcgagactagcctgggcagcatggtgaaaccccatgtttacaaaaaaaaaaaaatacaaaaattagccaggcagggtggcacatgcctggagtctcagctactcaggaggctgaggtgggaggatcatttgagctcaagaggtgggaattatagtgagctgagacagtgccattgcactccagcctgagcaatgaaatgagaccctatctcagaacaaataaataaatatatatatatatatagaacaataagggtattgtaacagggaaaagagatcaagctcaactccaaacacagcaaggacaagtgagaacttacagccaaggagtgaagctgagagggtcagtcaatggacaattactaagacgtaacgtcaggagtagggagttttttttttttttttttgaaacagagtctccctctgttgcctaggctggagtgcagtggcacgatcttggctcgctgcaacctccacctcctgggctcaagtgattctcccacctcagcctcctgagtagctgaggctacaggtgcacgccaccatgcctgggtaatttttggattgttagtggagacagggtttcaccatgttggccaggctggtatggaacgtctgacttcaagttatctgcctgcctccgcctcccaaggcactgggattacaggcatgagctaccacgcccagccgggagattcttgcaatcttgcaaaactggcctaacagaattcttgctaaagacaggccaaggacttacacatcaaaggtggaaaatgaggaacttgatcagattatcaagggtggtcagatatcaagaatgaaaggataacctagcaggattctttgcgaagactggaatggataagccaaagagaggatggggccagggtcacagcctagtcaaaaagagggctcagaggagcctgactacagtttcatcaaggagggaattattgtcaaggtagggctctggaattctgtatttaacaagctcattaagatttagaaagaaaaataagctgaggaaggagaaagaccatgcaccaggtcacatatgcaaatatgagacggccaggacctgaagaagtccccagggactggtcaggttggatccagtgtttcaatgaactagtgtattaaatagcaaattgcaatgcggctcctatgtacatgttacccaggattgaaagcaactttgaactgccttggagcaatttccacagaaagcgtatctgcctgagaagtagaaaccttggactgtggagtttcattttacaactttaactctgaaaaaacaaagggaaaagaggatggaaaggaatgggttacaaaagtgcccaacatgggacaaggccagggctgttggactccccagctgcttttggtcattgggaataattaaaccccctagtaacagacaagaaataatgaacagacatatcagggccagctccccagatattataaaagcatgggaagtaggggaggcaacatcttcccacaagacaattacagtagagatgcgtccataacccagagtctatggaccacgctgctgtatgtcagtggtttaattcttttccttttaaggaaagatctgatattttaatggttttttaaacgttatcatgcagagctaagtgttaatattctttcaatgcattctcctgctttttagcctctcttgccttccttgcaaatctgcctgttgaagccctccttgaccatcaaggaccagtttaaatgccctcatgtaagaagtctcacctgacccacaaccaccaccacccaccactggaagaaaatcccctgatatcagactcctgtggtccatcagtggtgaatctcttttagcttctgaaatataatttctgatgtttattagaggcaaaaagaatcatattttatagccatggtttctacaatgagccctgaactattgtggttttccaagttttcattctcaaataagctcagagcatccctatccctcctgcaaatccctaaaaactggaatttgaaattcattgtatgcaacataaatctgactggttacataatataaaacatcagacagagctggcttccattcaagtcatttagaacatgtttcataaaagctgaacctcatgggaggcagcctctcaaagccaaagcaaagctgcagttcatccttagaccctccttggtctcaaattaaaatatccaggaggatagaaattgatgagatttcattaagtaaaaaatttcatgaaaatcaatcctaacctctgtagctcccagcagcgggatctgtgtttatatgaacagcattaaagataagctgtcccacggaaattacagcagcagttatcaaacaactttaatgcactcttaagtagaggcactaaaatttagaattcgcactggcttttctgtcgttcacggcgtggcgctgagtcagcctgcaaccacacaagaaaacagctgttgagaaatacagcttcctgatttaaaaataaaatcagtaaatttctactaaaagtttctgctaaattccttattgcattctatttcaaaggaggggtgaaatatctagaatgccacgatggtttttaagcataaggggttggatctgatgaatttcatgtttgtgctctgggactttactagaaaaaaatgagggatagatgactaattgctacaatattaatttcatacttacattccccataaggcatgaagcaaaatttgtcagcttgagggaaatgagactggactaattatcaggacctcagcaaataatgatccaatatccaaagaactgcagtctgccatgaaatatttgacaattcttttaaaaagtcagcaaacttttctaagaagagaacgcaggccaggcgcggtggctcacgcctgtaatgccagcactttgggaggccaaggtgggcggaacacctgaggtcgggagcttgagaccagcctgaccaacatggtgaaaccccatctatactaaaaatacaaaattagcaatgcatggtcgcacatgcctgtaatcccaagtacttgggaagctgaggcaggagaactgcttgaacctgggaggcggaggttgcagtgagctgagatcacgccattgcacttcagcctgggcaacaagagcgaaattacatctaaaaaaaaaaggaaaacaaagaacagaagagaagagaaaagaaagaacagaatgcaaagacaactactgcttttgatacaggcaattttatgaccagtaacaagtagatgtttctgtgggaaatgtctcctagcatatgagatacaacatcaaatgtcgcaggctaatgtgagaaacagtctatgatgatgagtgaatcttgactttgagcaacacacggaaactccaaggcctcaggttttgtttttaaatctattaaataaagaatctaggctcattgtattactgtgcccctgctggcttcaaccttctgtaatgctaagaccagcctcactctgtttaatacgtgtgtcttccagaatgttctttaaccacagttcttctgtatgacatttcctctggttttgctgaaagaggggcaatggctactccaaaagactcctttatgtaagttccaaactttgtggaaaataatctggtaaatccaggagatgttatattcccacttgccattctggatgtcgtctattaattccaattaatagggacacagctcattggtgactacatggaattctatcaccccaaatgctcacctctcactgcctaccctgcagaaatctcaggcactcaaactgcaggcagtatccaaagacctgttctcttcatcaggagacccaggagatccccaatccttgtaaaattcaagagtttattcaagactatcaaccattgtttcctggatcggactatacccattacattttaacagccctctctgactcagggacatgagtacagccagggggaggaggggaggagagacgctaaaggagagattggggttttgttggttgtattttaacgtttgagttttgggaaggttggtttcatggttttacttttggttttttgaggactatgtttgtttttatttttattttttatttttttatttttgagacagaattttgctattgttgcccaggctggagtgcagtggcacgatctcagctcactgcaatctcggcctcccaggttcaaactattctcctgcctcagcctcccaagtagctggcattacaggcacccgccaccacacctggctaatttttgtacttggggtagaggcagggtttcaccatgttggccaggctggtcttgaactcctgacctcaggtgatccacctgcctcagcctcccaaagttctgggattacaggtgtgagccacctcgccctgccactgtgtttgttttttaacttaccctaccattggctgaaatttctgcagctgaaaaatagaagcaagctctagttgctttctacttaagataggtatgtaagtcctggctacatcatgcctcatgacccaaacagccattctaggggcacaggcagcaggcagcatgcataattccatctgtctcatgctaagattcacgggtgatcactttcaaagagcatgctgaacttctagtgaaactttacacactgaaaacttacacaccacactttcatggtggactgcaaggtcagtgtttatggacactactgagagaaggccagggagagtgatgaagtatgaatatgaaagatgcagagaaggcaaagaaaacagaaaagaaacacaaagcttatgtccctgacataacgatgggagacagtcactcaccacaaacaggaaatagaacaagaaagacctctagccacagtggcaggcaccatagcagcagccgggccacgctcagccaacccaccagagcgttttcgtgcaaaatgttatcgatgtgctgcacatcttcagtgaaaacaaatgctaagcacagaaaagttgcaaatcttgcagtaaaagcaaaacagtaaagttcacatagaaatactttattcatcttaaagaaaagatttactttgaagaaagtagggtagctggagacattcttggaaattctggtttgcaaaaccattggttttgtttactatcagggattttgtgttaagacaaatgatatcagtatcattcttacccctatgaaccacaattattacggccattgtgggccttaaggtaggacaggatagggtaggataataagaaagatagaaaagtaggccagacacagtggctcacacctgtaatcccagcactctgggaggctgaggaagggggatcacttgagcccaggagttccagaccagcctgaccaacaaagggaaaccccaactctacaaaatttttctttctttattttactatagctggtagcaactgggaaaaaaatttttttttaattagcagggtgtagtggtgtgcacctgtagtcccagctctcaggaggctgaggtgggaagactgcttgagcataggaggtcaagcctgcagtgagctgtgttcatgccactgcactccagcctgggcaacagagcaagactctatctcaagaagatttaaaaaaggaagaaaagcaaggagaaggaaaaaaggaaagaaaaatggagaaagcagagaaataggaaagaaattctctgaagatcaataaattagaataaaggaggaaaaatatgagagtgatctgaatgtgttaaaaactgaactgtgagttcggagataagaggagcaaaagcaaatggaagtgaagagactgtggctcacgtgtttccctgaagcatctgcaggaatgttggtcagatgcctgctggcctgagaaatgaggaggtggacagtgaccagggatgagtgcttgtactagtcagggttctcatgataaacagaatctatacatatgcacatatatgcacaacacacatgtatatatctgcatgaagagatttattataaggaattggctcgtgtgattatggaggttaacatatctgaagatctgcagttggcaaactggagaactaggagagcaatggtggagttccagtccaaggctgaaagcaggagggaaaaaatgatgtcctagctccaaagaaagtcaggcaggagaaattccccctcactcaggggtagggcccgagttttgttccattcaggccttcaactgaaaggagaggaggagagacgaggccaatatctttcactcagtctactgatttcaaggttcatctcatccaaaaacaccctcatagaaacaaccagaatatctgaccacgtatctgggcaccttgtggcccagtcaagctgacacacaaaattaaccatcacagcagtcattgtgtaataggccccaagaaaaacacatgaggaacactggttactcctaaaacatctacattgaccaagattagaggacagaatctaaattagaagtgcaacttggaggccaggcgcggtggctcatgcctgtaatcccagtattttgagaggaggaggcgggcggatcacctgaggccaggagttcgagaccagtctggccaacatggcaaaaccccatctctattaaaatacaaaagaattagctaggcgtggtaatgcgtgcctgtagtcccagctactcaggaggctgagggacgagaattgctcgagcctaggcagtagagattgcagtgagccaagattgtgccactgcactccagcctgggtgacagagagagactccatctcaattaaaaaaaaaaaaaaaaacaagaagtgcaaattggagaagcccaaggaaggtgctgagcatggaggtgtcttgcaaatattcctttccagctccaccacagacctcaggctgcaacttccctgtcactcaagactccacaatcagaactgtggcagctctcagaacctctacaagacaggatggcaaatcctcaaattataggcatgggtttcgggtcagaaagtccagctctgccaagtggagatccctggcatctacttctgaaagtccctgtggcctaggtacttgacctctcccaacctcagtttccccatttgcaacagcaaatataacagtgcccacctgctaggattggcttgttttggtttttttttctgagacagggtcactctgtcacccaggctggagtgccatggtaccatcatggctcactgcagcctcaacttcccaggccaggtgatcctcccacctcagcctcccgagtagctgggactacaggcacacaccaccacatccagctaatttttgtattttttgtaaagatggggtttcaccatgttgcccaggctggtcttgaactcctgggctcaagtgatcgtcacactgttgtttcccaaagtgctgggatcacaggtgtgagccaccgtggctggtcaggattgttatgagatgagaaagaagcaacagatactaaggaattagcccaataccagacacatactaggtgctcaaaaaaacagtcatagttctttttgttttgtttcttattttatttatttatttatttgagacagagtcttgctctgtctcccaggctggagtacagtggcacaatctcactgcactgcaacctccaattcccaggttcaagcgattctcctgcctcggcctcctgagtagctgggattacagtcatgcgccaccacacccagctaattttttatttttagtaaagacggggtttcaccatgttggtcaggctggtctcgaactcctgacctcagatgatctgcccgcctcggcctcccaaagtgctggcattacaggtgggagccactgcgcctggtctgttttttaattaaatgcttgttccctccacaaagtttctgcccagaaaaacaccagccacttccacagagaaatcttcctggcaactgtcacaactcccttttctttctatccagggtaggcctggtttgtagtcaggcaactgactatgtcaagtaccaagagaggtccctgcagattgaccaagcctaggcagaaaatgttcacactgaggcataactgaattaggcagaaaagcaaatgcctggcaggttggttgagaggaaggccagaggggcctgggggacttcctttgggcagccaggccgataatcaggcagcaaccacgtaactggccttgcctcttccctccccacagaatataagggataatggaaggagctgctcgtgaatcgtgcagctgcagcaaacaggcctcctgggccccgaaagcattgctacccttttccccactgcctgttatcggacaaaggcaggatgcaatttcccttcttcccagaatatacaagacaactctgtatcctatcataactggaatcctgcaaattacctcttttcagagaggccccatccaacttccctacagaaacaacagtgcctctctcctactccaaggagaagcacgtccgagatgttttcttggaatgtttccttgactttctgcaagaagcaggtcgtgcttattaacggtgccagctcctcctgtagctctattgttaggaagtgtcactcttgcccctgggcaccctgcctcccacccagatccgagattcttcaaggcagaacaggtgctttctctctgcacattgctttcctgggcctgggaaaatgcagagcacatacccaaaggacctcagtgaagggcagcattgacccacagaggcaccagggggacagggggactctcttccctccttgagagttgtgttagtctgttttcatgctgctgataaagacatacccgagactgagtaatttataagaacaaagtgtaatggactcacagttccacatggctggggaggcctcacaatcgtggcagaaggcgaaacgcgtgccttacattggtgtcaggcaagagagagaatgagagccaagcggaaagggtttccccttttaaaaccatcagatctcatgagacttattcactaccatgagaacagtatggaggaagccacctccatgattcaattacctcccactgggtcccttccacaacatgtgggaattacgggagctacacttcaagatgagatttgggtggggacacagccaaaccatatcaagagtctatcaaaacagtccttgtgggcttcagacatcattaagcagctcctaatccatctagtggtcaattaagctaagaagctaaactgagattctcagaggaaaaaaaaaaaaaaggttcgctctggatggatatggctgaggtcccacatgctaggataggccccggcatctgcgtcatcccgtggagcaatatgcggctccgaggccagcataaatcaggcccagagccacaggtgcggccagcccacctggccacaggcatgccacagcaccatccatcacactgtggctgcccagccatcagcagagtcggccacggggacaggagggcttggtgactggctgccaaacagcagcatgtttgattaatattatcatatttttctcatgaatttttaaattcagataattcaccccgcattacttttatagatgtatatatacacactgcatacagggaagttagccaagtctacacatgactgagtaatccaatttcaatgaccttgatgattctaacataaagaaagtcactgggcctaagtggaccagagtctgtagttcagagaaagagcaaatgcggtggcttgggaggggtaatgggaaatgtggccaaggacatcccaggaaggacagacaagctccaaaccaacacagcagaaatgtggaagtgaagcaatttgttcatagagaaaaggatggacaattaagccaacaccaggcaccaggctgagtgaaagcatgtgtgtgcgtgtgtgtgtgtgtgtgtgtgtgtgtgtgtgtgtgtgtgtgtgagacacagagagagagagagagagagagataaagagagagtgagagatacaaaaactagtgtttaggaagatggtttacaaaggacatgtccaggaaagtttgagagtacttcgtaagtgcaaggatactgaaaatgacaaagaaaaagaagggtcagtgctaacacccagactaaaaatctggtggctggaacactggaggtgatgctaatagagatgaagaagttggaagagggaaaacagtaagtttgggtttcaggttaaacttccaagattggcagaccaccttacagagggcacatcctaaggtgatcgatcccaaatgatccatgttcttgtataacccctccccttgaatgtgggcaggacatgacaaaatgatgaggtgtcactcctctgattatatttcattatgtaagatttcatctaagcaggctgggccttgaaaaagcaaactgccgagctcaggagttcaagaccagccgagccaacatgatgaaatcctgtctctactaaaaatacaaaatgttggccaggcatggtggcacacacctatagtcccagctactcgggaggctgaggcatgagaatcacttgagcccgggaggcagagattgcagtgagccaagatcgcactccggcctgggccacagagcaagaccctatttcgaaacaacaacaacaaaagaaaggttataagcgccatggctatgactagtgtcaaattgcttgccattgttttaagaaagccagatacctggattggactctggggtgttctccgagggacaccttcgtcacacaaactctgtacttcctggaatcgatatagcactaagttatgtgcaccaaattataaaagacttatccataatattttctcactgaaattctcagggcttttaatatctccagaatatatttttccattttccataagactcaaaagtaataaaagctctaataaatctactacaaagtcactgcaaaaagtagaagatgaagaggactctgaggaagacagcaatcatgatgagatgagtgagcaggaagaggagcttgaggatgaccctacgatagtcaaagactatcaagacctggaaaaagcagtgcagtctttttggtatgacgatgtcctgaagacaggcctagatattgggagaaacaaagtggaagatgcgttctacaaaggtgaactcaggctgaatggggaaaagttatggaagaaaaacagaacggtcaaagtgggagatacactggatcttctcattggagatcttctggatccaatgtatctgggagatatattggatcttctgtttggagaggataaagaaggaggaaccgagacagtgatgaggattctcctgaaaaaagtgtttgaagactgaaagtgaaaaacacagtggtgttacggcggtggaaaaacttaaagttgcctaggaagagaatgtctaaataaacggattgctttttgcaatacagctgctttctagtggtagaggaagcagtcaaagaaaaaagaaaaaaagaaaattgccatgttggaactgcctatgaaggggctgtgtggcaggaactgtgggtgtctataggtagggagaacggcctctaagcactgaggtggcctccagctgacagccattaagaaaccagggggcagggcatggtggctcacgtctgtaatcccagcactttgggaggtcaaggtgacccgagctcgggagttcgagaccagcctgaccaacatggcgaaactccatgtctacaaaaatgcaaaaattagccgggtgtggtggcgcacgcctgtagtcccagctactcgggaggctgaggcaggagaattgcttgaacccaggaggcagaggttgcagtgagattgcgccactgcactccaacctgggcaatagagcgagactccatctccagtaaataaataaataaataaataaataaataaataaataaataaattttaaaaaataaaaaaaaagaaagtgcagtagaatgaatacatttccatgggttaaaaaggaaatggccaaaagaggggggaaataattgtgctacaaagaccaacatgacctggcctgcttgacctcgctgaaccttctatacgctccttcttgctcagcctggtccaggcacactggccacctttctgttgctcccactccagcacgagctgttattacctcttcccagaatgctcttcctccatagacacatttccttccattgtttgcccaaagcctttcctataaatgcctaccctgaccaatgtatttttaattgcactccagttacctcatgagctgctgtacttttatccagaccatttatcaccttctgccatgctctaagatttactatttgttatgttgattgtttttgtctccccctgctagaatgcaagctccacaaagaccgatttttgtctgtatttttttgctgataaattccaagatttcagaacaatacatagtacaaaacacatgctcaggaaaatatttactgaatggttcaaggcagtcattaagcaatgagattggtctacatgtattactgttgtaagatgtccatgagatctcataaggttaaaaattttaagagcatgtcagaaaacaacatgtgtactatgatcctttcttatatatgtaaaaaacaaaaactttcctttccaagcaatccattcctgaagtcttaacacgggccagagcaaggtaggcgttcacacaggaaggggaggccatgatgtcactgagtggggtgtccaacccaacccagcagggtgaggaaggggccatgtggaacagcagcccagcacgcgtgtccaagccaagcatgacaaggagggcatccacgtgggaggaggtagagccaggacatagagattggttacaaacatgccagttgaccaaataagtaaagatatgaaggataatgggcaccagagttttgcttgttggagaagccatttaaatgtggaaaaagagaaaactagaatgaaccttgtggagctgaatcagaattgaaggcatcagtgtgaattcatgtgtgtgaagatgtaactccctagtgagcgtctggggacagcgactccccaataagcagggagcacaccttaagcccagattttggtttctacgtcctggtgtccactaaaagaaaccacgactccttagagaaatggctggttcccctgctggggcaagcaaagaataagatgagcctagagtccaggcacggtggctcacacctgtaatcctagcactttgggaggctgagaggggtagatcacctgaggtcaggagttcgagaccagcctgaccaacgtggagaaacccgtttctactaaaaatacaaaatcagccaggcatggtggcacacgcctgtaatcccagatacttgggtggctgaggcaggagaactgcttgaatccaagaggcagaggttgcagtgaggtgagatcataccattgcactccagcctgggcaacaagagtgaaactctgcctcaaaaaaaaaaaaaaaaaaaaagaccctagaacataggctagaaagtaaggaagtacttaaagaatgatagcacagagaaacaagctcctctcagccagatgagtggcaatatgagtatcaaaataatttaattttaatttttttttttttgagacggagtctcactcttgtcgcccacactggagtgcagtggtatgatctcagctcacttcaacctccacctcccaggctcaagctattctcctacctcagcctcctgagtagctgggattacaggcacctgccatgacgcccagctaatttttgtacttttagtagaatgagagtaatgaaatataggccactgaacaagacacagtaaactatgagttaatagtagaacagctcaaaatctggaccaccagatgggaagcgctagaacacagcgattctgtgacgctgctgccaaaaatgcagaaccagattctaattgtggaaaaattatcaggcaaaccaaaattgaggaatcttctagaaaacaatagcctgccatcctcaaaagtgttaaggaaaatcatggctgtcaaggaaaaactgaggaactgatctcaactgaaggaaaccactaaatgtgatgcatgattctgaactagatccttttgcttacaaaggacattccaggaacaaggggagaaatctgactggggtctgaggactagagggtggcaatgtgtccgtgttaatttccggatatcaacggctatcttgagattacacaggagaatgttcctggttgtgggaagcacacactgagaattccagggtagcagaacatcaatatgtcactacactcaagtggttccagaagggggttgttggaaaagaaatctcttttgcattatattcttatctttctgtgactgtttaaaatttgtatattatctaaagaataaaacatttgcaaaaaaaggtaggctggtccacagatcatttctggaagggtgcaggagagatggaggaggctcaggaaggaagactctcctatcagctctgcagggacactgtggcacagagagggtcatacctggcggaacccaggaccaggtgcgtgaggatcagtagcctccctgccgccctggcaagggtgagcttcctcgagctcctgttcccatatccgcctgtcactcagggcaaagggcctttgccagggaaactgggaaacgtctgctgcatttggaagattttttaagataagatgaaaaagttggcaaatttctcacactgcttctttcattattattttaggctgcaaagaggtttgtgatgtgctacagttgatcaactttcatgtttttaaaactttttacttggaaatgttttatggtaggtacataatccccatgtactcacgatatagcttcaactattcaatcctagtttgctatactcccccaacactggcttatttattttgaagaaaataagcatcctattctatcatccattaatacctcaacacttatttctaaaagagaaggaccttttacttaaacatcatcccacccaccacccaaaaatccttaccaccaccaattaaccattccctgtttaaatgtccctgattctgtctgcctctctctccttctctcacagttgttgtgttcaaatcaggatccatacaagacccaacattgcacttggttgatttgattcttccacagattccttctatttcttttccttttgcaatgtttttcacagttttccttttccagttcaacatctttgcagtttaagatgctcctctctccccctttttactgactccccatgtctcctccctgatcatttttttagaaaatttcttattaacaaatcttccatgagcccagaatacgggcactttatgttcaggctccggcagggagctcagaggaggaggtagagagctctgctaatcccagcacgaacttcacagaaaacaaaagtgcaagtaaattccacagaaacacccagacggtcattgctctaccattagccaagatttgggtgcaccactgtccccttagcttcctcatctttaaattaaaggcattgaaaaagatcatgataatgacagcaatgacaacgacattaacaggacatttaatatttgtccaaaggtccctcaagattccttccagtcaagactttctctgtgattttaaccatcaaacacacttcaatatattagtgaagagcaacattctggttaggggggagatatttcataaatgacaaatgaaaagtaagacaatgataacaaaggaacggagaccacaaatgtagatgacaaaagaaaactacggtcattgtcatatctaaatttgaataacatgctatgtttcaaagcactttcttatacattagcaaatctcagccacactaataggtaaatgataaagaatggtataaaaggttaataatggtggaaccttgggtatgcaggtgtttcactaagccagtggatctcaaccagggtaatcttgtgtccccccacctcctgcctccaggggtcatttagcaatgtctggggacattttggttgtcccagctaggaaggtgtcctgacctctactgggcagaggccaaggctgcactgaaatatccttcgatacttggcacagactgcaccacaaagtatccagcccacaatgtcagtagttcagaaactgagagatcctgagataggcaagtccccttgttacccaactaaaactgtactagaccaggggactagggaggctactgaggcctgaaggcacaggaagtcagacaccttgtattacaaccctccacactgtgggctaccctaacacatgaggttcgataaaacaatcggccgggtgcgggggctcacgcctgtaatcccaacactttgggaggccaaggtgggtagatcacctaaggtcaggagttcaagaccagcctagccaacatagtgaaatccgtccctactaaaaatacaaaaattagctgggcatagggggcgggcgcctgtaatcccagctactcaggaggctgtggcaggagaatcgcttgaacccgggagacggaggttgcagtgagccaagatcacaccattgcactccagcctgggcaacaagagcgaaactccatctcaaaaaaaaaagaaaaagaaaaagaaaaaagaaaactgtcctggtttggttttgttaccgagatagatcacaatatatatttctaagtctgaactattccctcaatgtattcttcttgggaaactgtacttaccagacactgtccaactgaagaatttacctgcttagcagacctgtctctgaatgacagcacctgcgctgatttagacaatgggcacctgcatccttgggaaccctttactctaatgggagcgactgacaatgaatacgtccatgagaaagagtcaggtggccatgagtgccatgacgagaacagagccggaacaggaaggggaggggagggaggggtctggggagagggctgctacttcagcttaggttctcagggaagcctgtccggggaggcgatatttgagccaagacctgaaggaagtgaatggctagccaggcagagcttggaaggagagtattgggggcatgcagtgggaaggcctgtagcaggggcacgctgcgtgtattctagtcccagaagaaaggcctctgaagtgccctaaatgaggaggacaggaggtgagagagaggcggggccaaatcccttgaggcctcctagtcccagcagaaagtctagctttcaaacaaactataatgggaagccattggaagttcaaccggaggagtaaggagacttgattgctattgattgattgattgattgactgagacagggtcttgttctgtcacccaggctgactgcagatcaaagctcactgtggcctcaacctcccaggctcacacgatcctcccacctcagcctcctgagtaactaggactacaggcacgtgccaccatgcccagttaattttttttattttttcatagagattgtctggctatgttgcccaggctggtcttgaacttctggatgcaaactattcagatccctctagctattctgtggagaatggacattatgcaggcaagaaggaagaagaaaaccaactgagaggcaactgcattaagaattttactgaaaatcaaaaccacccaaaaagagaaatatctgccattgataaagatattccaaagaagaattcactcctaaaagctatttcaaaagaagagaaaaggccccagatgtttaattattagtggtctctttccagtaagggtgctgggcagtgttgcctccccaccctagatggcgtccgcaaccagaaactctggtgtgaagctattaataactttctccaacaggctgggactctgggattttaccatcagggggtggtgaagagcacccaccacctgggagaagcctggccagagggagcaatgcacaaggaacttttggaccagagtaagagtgaatataagctcagatctgcgtggtatactctctctcatattttatttgtgttcttgagtgttctggtctcccagtcttcaaagagccaactggagccggatggtgcatgggaaaaacggaggctgagactctcagcctgaggttccattatcttcccctctttttcctcagggtgcttttcctcatacttattattcccagccagcatggcaacaaggtccatgggggacccacacccagattacagtgtggatctagaaaatgcaccaaggaagctcctctgcaggttttaaacaagccccaggtcagtctagcacgtggtagactccaactccccaggaagttagcctgagacctgaagctgaagccactgcccattttaaggagtttgtcctctcctccctgacaaaccccaggcagtagtgggtgggtggtcaagcatcagaggatgatcccctgtccctgcctttcttctaccatctccttcgaccacacacacataaaggcaggtagcaaaaccccacaatctgtgcaccactccggaagtgccactgttcaaggttgggcgtggtggctcacacctgtaatcccagcactttgcgaagctgaggcgggtggatcacttgaggtcaggagttcgagatcagcctggccaacatagtgaaaccccatctctactaaaaatacaaaaattagccaggtgtggtggtgggcacctgtaatcccagctactcgagaggctgaggccacagaatcacttgaactgagaggcagaggttgcagtgagccaagacggtgccactgcattcctgcctgggcaacagagcgagactctgtctcaaaaacaaaaatgaaaaaggaagtgctactgttgaagaacaagtatagacatccccgcatcctaagaggtccttcatccacccaaacttaagcttcacacttcaaagactgttaattacacattatgacaccaattatatctgaatgcattataaaacagaatctttggtaagctattttactgttttaattcttttcttccaccatttttaataattaaactcctgtttttatattaagatgcaattaaaaaagaaaagtcctttaaattttcaatctatttcattttttttacataaagaattcaatagccatccattataatgtagcacacaatatagccaaaggaaaaatgaataacttagataaaacaagatgaattccatttagggggaaaaaatacaagtctacgtattttgaaagcccttagcatgaaatagtcaattaaaatatggggaactcccgaccaaacacagataaaacaaaccacatggtagcatactcctatgaaagagaaagctttactctgtaaaagaagagggcacagcgaatcgggtctcaaaatgctgaatttgaggccaggtgcagtggctcatacctgtaatcccagcactttgcgaggccgaggcgggcagatcactggaggtcaggagttcgaaatcagcctggtcaacatggtgtaaccccgtctctactaaaaatgcaaaaaattagctgggcgtgatgtgcatgtctgtaatcccagctactcaggaggctgaggcaaaagaattgtttgaacccgggaggcggaggttggagtaaactgagatcacgccactgtactgcagcctgggcaacagagagaggccctctctcaaaaaaataaaaatttaaaaaatttaaaatgctgaatttggggactgccagcattcaattatcgatgaagtaaaaggacaccattatttagtgtgagcctacccatgctgaattacatttcaaatataaggataatgtctcacatgtacaagagtaaacaaggaaaattaaataattttgatccttttgtgtgtgtgtgagagacctgatcttgctctattgcccaagctggagtgcagtagtgtgatcatggctcactgcagcctcaacttcccagactcaggtgattttcccacctcagcctcccggccagctgggaccacaggcatgcgctactatgcctggctaatttttctatatttttgtagagacggggtctctccgtgttgcccaggctggtctcgaactcctgggctcaagcgatcctcccgcctcagcctcccaaagtgccgggattacaggcatgggccaccatgtgcagccagttttgatactttaaagccacagtttgtgagctacaaacttcacattcacatgtactaagactgaacaatgtgtcggggacgagaagtattcctgtgtgatccatctactacagccttattcatcctttgtttctcttctaacccaaagatcagcaaacttttttttaaaataaagggccaaatagtaacgatctcaggctttataggccatatttcacaactactcaactctgctgttgtaacaagaaagcgcagctataaataacaggtacacaaaggagtatggctgtgttccaaataaaactttatttacaaaaacaggcccatgggctgtgatttgctgacccctgttctagttctcagggtgctagaaaggaggagtgaagcagagatacacttaagacactcctgaaagaacacagtaggaataagcaaagagatccagttgatcctaatgtatccaccaggcatagccgattacacccaggagtattcttgtaagacaaaaaccaagtcgagagatattaggttggtgcaaaagtaactgtggtttttgcccctgaaagtaatggaaaaactgcaattacttctgcaccaatctaataccagggaggcatcatttctcaacaaccacaactctcaagacacgagggcctctccctcacagaagcagcaacattccatcatggggtttgtcccctgaactgcatatccactggagattctatagtgacctctccgaactgcctacctaaccccacttttttgttttttttttttgtttttttttttgagaccaagtctcactctattgaccaggctggagggcagtgatgcaatcttcgctcactgcaacctccgcctcccaggttcaagccattctcctgcctcagcctcccaagtagctgggattacaggcacctgccaccatgcccaactaatttttgtatttggagtagagatagggtttcaccatgttggccaggctggtctccaactcctgacgtcaggtgatccacccacctcggcctcccaaagtgctgggattacaggggcatgagccaccgcgcccagccagcctgcctcttcttatgtctagcagcacaccagggctggggacgcaggctgtggtcaccaattcaaaagaggtaactgctctaccagggagtgaccttacccaggaactaatcaacaactcgatgagagctcaagacataagcctttcgactccagctttgaactcttacctgccgaagggccgagaagagcccactgagcccagagcagccgtgatcaaccactgtcacttcacaaaccccaaatacatgggttcttccttctcgtggacacatcttcctctcacacttcacactccgcccggagcaaaccctgtcaattcaaccctcaaagggttccagaatctgctgcatctccatcgccagcagcccattgccagtaccagctacatcgccagcaccctcatcactgtcacctcctaattggtctccctgactttgctcttgcctcacttccaacagaatattgtcatgttaaaaaagaagtaagaggccgggtgcagtggctcatgcctgtaatcccagcactttgggaggccgaggcagacggatcacctgaggtaaggagttcgagaccagcctggccaacatgacgagacctcatctctactaaaaatacaaaaatcagccaggcattgtggcgggcacctgtaatcccagctactcaggaggccgaggcaggggaatggcttaaacccaggaggcggaggttgcagtgagccaagatagcgccattgcactccagcaacagactaaggctccgtctccaaaaaaaaaaaaaagaatagggggtgaaaatcaacaaacagcaggcacagatttggggctagataatagacaaataagtgaaaaagcaaatttattcacatacccttgatgcccctagaaagtccttcaaagcacatgacagggcgtatatgaaagtgtaaactgctcaccatatgaccgtcaggcttctgaagctgtttacatctggaatgcgaccatcaacctggaaggtaagaaaaacaaacaaacaaaaaaacttctgagtgacaaacagcttccacaaagcccatccattttattccacagaagaaaaagaagtgcgtcatttataaaactctaccagaggaggcaacagccatcgctaataacagaggaaagaaacaaaggccgtaaaattagaagcagaggagcagaaccatccaggaccttgaaataaagatggagtccacacagagtcaaccccggcacatcaccctaacagccttctacagtaacaatattcctaggtcggcaacacaggctcaaccaggctcagaatcctgttcaaggacacaagatgagtaatacgtttttattctatttttatttttattttcttaagatggttaaaattgcaccaggcgcagtggttcacaccctaatcccagcatcttgagaggctgaggctggcagatcacttgaccccaggagttcaagaccagtctcggcaacacggcaaaacgctgtctctacaaaaaataaaaatacaggccgggtgcggtggctcacgcctgtaatcctagcactttggaaggccgaggtgggtggatcactcgaggtcagaagttcaagaccagcctggccaacatggtgaaaccctgtctctactaaagatacaaaaattagccaggcgtgggggcatgcacctgtaatcccaactacttgggtggctgaggcaggagactcccttgaactcgggaggcggagattgcagtgagccaagatcgagtcactgcactccagcctgggtgatagagcaagcttccgtctcgggaaaaaaaaaaaaaaaaaagccagatgcggtggctcacacctgtaatcccagcactttgagaggctgagacacgagaattgattgaacccaggaggcggaggttgcaataagctgagatggcaccgccgcactccagcttgggggacagagtgagactctgcctaaaaaaataaaaataaatttaaaaataaaaatgaaaaatatcagcctggtgcagtggtatgcaactgtagtcccagcgactaggaaggctgcggtgagaggattccctcaacctgggaggtcaaggctgcagtgaacggtgattgcgtgattgcaccacagcactccagcctgggcgacagagcaagaacctgtctcaaaaaaaaatttttcttttcaaagctaatatattcttattttattttattatttttatttatttatttatttttagtgcagagtgcagtggcaagatctgtagtcttgaactccaaagctcaaacgatcctcccaccgcagcctcccaagtagctgggactacaggcatgtgccactatgcttggttaaaagctaatatattctcttaataagggagggaacagctttcaaagaaagacagaattaagatgaatgagtaaaagctgaggcagatttcagcccttgcttgagaccaaggcagggcttcttaacaaggagaaccagcctataagggcagtgactgggcccctggcagtgagtagtgatcttctttttttttttttgagacggagtctcgccctgttacccaggctggagtgcagtggtgcgatcttggctcactgcaagccccgcctcccgggttcacgccattctcctgcctcagcctccggagtagctgggactacaggcgcccgccaccatgcccagcgaattttttgtatttttagtagagacggggtttcaccgtgttagcctggatggtctcaatctcctgacctcatgatccgccctccttggcctcccaaaagtgctgggtttaccggcgtgagccaccgcacctggctaatttttttgtatttttagtagagacggggtttcaccgtgttggcctggctggactcgatctcctgaccttgtgatccgcccgcctcggcctcccaaagtgctgggattacaggcgtgagccacggcgcccggccttcttacaggtcttgatattcaggcgaggttgaactagaggtccttgaggatcccaatcaattccaaggttttatgatgggtcatgtcaaagcaaaaaattattctgacattttttacaaatggtaaggcagactttatttaggattacaacaacaggtgtcaaggtcattgcaatagggagaaagattgggctcaactccaaatacagcaaagacgtctggagatcagtagccaatgagccggggaggcgtctgtggaggggaaattactaagaagagatattaaagtcagggggattcttgctaaatcaacttaacaggattcctgctgaaggcaggttgacttagacaacaaggatagggacaaggaacttgatcaggtgtgatcagatatccagaataaaggatatctctctaaactcatctagcagctctctaactttagcaggattcttgctaaaactaactgggaaggcctggaaggtgggggtgggctaacggcctagctgagaagggggctcagagaagccggattcaagtttggtcaaggagcaagtcttcatcagtaatagtaactccagggaacagaggtcctgatacctcgaggtggtgcccaaggcaacagggaagtactagccagagcaaagagcagaatccagacgtcctggcccgaagctcagtggggtgagttgtagctggtgcccagtaatacctgacaccacataacaccttctagtttctccatttcttcccgcgtataattgcgcttttttgcaaaatctagaaatggccgtttctaaacatcaagctaccgtacaataaggggaaactacctttgcacataatgccatgtgagcaatttatatacaattccctgtgatattgaggcagattgattcatcatcatgaagacaatgaggcttttcaaagtggccttgtaatgacaggcatataaataaaataggccaaaaaaaaaaaaaaactgaaactaaaagactggatttaaaagcctctggcaaaaaccaggaagcttgcgatcactaacagaattactaaactaccctagcaaagttaaacaaagttccataatccccaaatccaaaggagagcatttaaagctgaccccagcctggtcaacatagcaagaccccatctccataaaaacttcttttaaagattaagtgggcgtggtggcacatgcctgttgccctggctacttcagaggctgaggcaagaggatcatttgagtccgggagttccaggctgcaatgaactacgttcacaacactgcactccagcctgagtggcagagtgagagtccctgtttcttaaaaaataaaaataaggccgggcgcagtggctcacacctgtaatcccggcactctgggaggccgaggtgggcaggtaatgaggagttcgagaccagcctagccaatatggtgaaaccccgtgtctactaaaaatacaaaaattagctgggcgtggcgacacatgcctataatcccagctacttgggaggctgaggcagaagaatcctttgaacccaggaggcagaggttgcagtgagccaagattgggccactgcactccagcttgggcaacaaagtgaggctccatctcaaaaaaaaaaagaataaataaataaaaataaaataaataaataaataaaattagccaggcatggtggcatgcctgtagtcccagctacttgagacactgatgtgggaggattgctcgagtccagggttcaaggttacagaatatccgtttctaaaataataataaaagtaaaaacaggccaggtgcggcagctcatgcctgtaatcctagcactttaggaggccaaggcaggtggggggatcacgaggtcaggagtttgagaccagcctggccaacatggtgaaaccctgtctatgctaaaaatatgaaaattagctggacgtggtggtgggcacctgtaatcccagctactcaggagactgaggcaggagaattgcttgaacctgggaggtggaggttgcagtgagccaggatcatcacaccattgcactccaccctgggcgacaagagcgaaactcttaaaaaaaaaaaaaaagtagaaataaataaaacgacacagctgcctttcttgatctcaaaagtgcgatctacttgctgggcagaggttatttaagaatccagaagggttggtcacacacagtggctcacgcatgtaatcccagtactttgggaggccaaggcaggcggatcactggaggtgaggagttcaagactagcctagccaacatggtgaaaccctgactctactgaaaaaatagaaaaaaaaaattagccgggtgtggtggtgcatgcctgtaatcccagctacttgggaggctgaggcaggagaatcgcttgagcccgcaaggtggaggtttcagtgagcgaagatcacaccactgcactccagcctggacaacaaagtgagactacctctcaaaaaaaaaaaagaccgggcacggtgactcagggctgtaatcccagcactttgggagaccaaagcgggcggatcacgaggtcaggaggtggagaccatcctagctaacacggtgaaacccgtctctactaaaaatacaaaaaaattagccaggcgtggtgtcgggtgcctgttgtcccagtgacttgggaggctgaggcaggagaatggcgtgaacccgggaggcggaacttgcagtgagccgagatggtgccactgcactccagcctgggtgacagagcgagactccatctcaaaaaaaacgaacctagaagggcgacgtgctaaatactctcagattgcccttcagatgacttttcctctttttcctctgggatctgtgcctgggaggctgcccttccacactttctggccctggggaggcaccacgggcagggatgactgtcggaagagggtcaagacagtaggaacactgaccccctgcttcctccccacagcagcacctggaggtctctcgatcacaagtccctttttctctcaggcttcagttctagggaacaaaggggcttcctcctgctgccccagtggaaccaatccctttttttttttttttttttttgagacagggtctcattctgtcacccaggctggagtacagtggcacgatcatagttcactgcagccttgaactcccgtgctgagcttacatgatcttgcccctcagcctcccaagtagctgggactacaggcacacgccaccacaccatacctggctaatctgggaagcagcaggggggttggtagagaaagggtctcattatgttgcccaggctggtctcaaactccagggctcaagcaatcctcctgcctcagcctcccaaagtgctgagattagaggtgtgagccactgcacccagcctgtctgcttttcttaactccgtgaaaacactttctctcgtgactctcttctgtcacctgtgagtgtgcgatatactttcctgccaagcctctgactgacaacagtagaagaagaagaggggcagagaatttaacattcaattttctggccaggcacggtggctcacgcctgtaatcccagcactttgggaggccaaggcaggcagatcacgaggtcaggagatggagaccatcctggctaacacggtgaaaccccatttctactaaaaaaagtacaaaaaaattagccgggtgtggtggcgggcgcctgtagtcccagctactcagaaggctgaggcagaagaatggtgtgaacccgggaggcagagcttgcagtgagccaagatcgcgccactgccctccagcctgggtgacagagcgagactccatctcaaaaaacaaacaaacaaaaaaaaaatcaattttctatctttgccctcaatggagagggaagaaacagagaacctgatttttaagctagatttccaggcatgggtaggggcaggtgtggcgcactgtctgaggaggctccgagtgttacgagtgtcagtgaaaaccttgaattttttttttttttttttctgagacacagtctggctctgtcacccaggctggagtgcagtggcgcgatctcagctcactgcaacccctggccccctaggttcaagtgattctcctgcctcagcctctcaagtagctgggactacaggtgtgtgccaccacacctggccaatttttatatttttggtagagacagggtttcaccatattggccaggctgggctcaaactcctaacctcaggcgatctgcccacctcagcctcccatagtgctgggattacaggtgtgagctcccacgccaggctgaaaacttcaaatgttatttatttatttacttatttatatttccttgagacagagtttcactcttgttgcccaggctggagtgcagtggcacgatctcggctcactgcaacttctacctccagggttcaagcgatgctcctgcctcagcctcccaagtagctgagattacaggcatatgccaccaggcctggctaattttgtatttttagtagagacagggtttcaccatgttggtcaggctcgtctcgaactcttgacctcaggtgatccacccgcctcagcctcccaaagtgctgggattacaggtgtgagccaccacacctggctaaaacctcgaattttctacacaaaattgtgtgtatgtgtgcatttttctgaaaagagaaatccagaaaggaaaaggtcaaaatgtttctatatcctcaaaaggtgaccaaaaattttaagagacaatgctgccgggaaaaccatgtagaaacagccactgtctccccaggagaagagagaggaaccggcaggtggtgggtacccaggtcagctccatgagcaggaatgccacctcttcccttgccaaggggagctgggctggaggaaggaccagcaccacccctccagccgccacccacccccgagggggcagctgggatggtgcgttcctgcaaatctctcacagctccctctcaacactcagtgacatttgcaaagctcatcagcccagcaggtgtcggatgcacaagcaacagcaaaagcagttccggggctggggaaaatctcatcgtgttgttctgaaaacctccgggctgctgagagtctccaggcagcaaaccaggagggaaaaaatactcaggagacaagagaacagcagagcggaccacacaggaaatgcccaggtgggcacaacgaagcccggagctgtctgcagattcctgccccggtgggcatcggtcagcccttccggagcccagatccgcccctcaggagctgtgtggggaggatcagcggccccctcccactaggctcggttcccccctttaccacacagacacgatcattcagaatgaacctcatagggctgttgtggggtcaaggagaaaatgtgctttgcatgtcaccaagacccagtaaatgccttcagatgtgtgttgggattagtatcagagctcttctctgttttcttccctgcaggggtgatcacgggtacaaacaaacagcaggtgacaagggaggttgatggaatcaacttcccagttccacagggcccttgcccaaagggagtggcaagggctaggtaaggtggcttatacctgtaatcccagcactttgggaggctgagacgggtggatcacctgaggtcaggagttagagaccagcctgaccaacatggagaaaccctatctctactaaaaatacaaaattagccaggcatggtggtgcgtgcctgtaatcccagctgctcgggaggctgaggcaggagaatcacttaaacccaggaggcagaggttgcagtaagctgagattgcgccattgcattccagcctgggcaacaagagcgaaactccatctcaaataataataataataataataataataataaagggagtggcaagccagccaggcaatgccacctgagaggggcgggagccttgagtccacagggagccctacaatgatctccatctcccatgctgtggtcccttttccagctgtgtcagtgtcctcagctcagaggcacaaggctgttgtggttaagagcctggatggggagcctcggtggacacttggtcttgccatgaactgactggacggccgtgtgcaagttatatcatctctctgtgacttagtttcctcatccataaatcaggatgatcataatcatagtacctgtgtttctgtgaggtttaaataaattcaaacaaagttatcagaatagtgtctgggccaggctcaatgtctcacgcttgtaatcccagcactttgggaggctgaggcgggcagatcacttgaaggcaggagtttgagaccggcctggccaacatggctaaaccccatctctactaaaaatacaaaaatcaactgggtgtggtagcacatgcctgtagtcccagctactcgggaggctgagagaggagaatcgcttaaacacagggggcagaggtttcagtgagccgagatcgtgccactgcactccagcctgagcaacaaagcaagactgtctgaaaaaaaataaataaataaaaatagtgtctggtgtgcagcaataactcaatagatgctggctgtcacatgccccgcatgtttcagtgagtttccaaggaccattaacaaagaggcctctgtgctccagatactggcaccaccagcccatgagcctactactacatggccttgatcctaagatgggttctgtaatttaatgttcctaaacttacaatagacatgcacatttcacatagattttctcatctgttaaatggggataataacagcatctagctaacaagattagtggaggattaaggattaatataagcagaatgctttgaacagagcttggcatggcgtacgcatcagaaattgtcctctgcaggtattttcaccgtcattacagtaattgatctgatctgctgcaagtcttcgcactccagtcaaatgtggaaattcttcctcacccctcactcaatccaggcatcacctgaccctggtaccaaagatgcacggtctggagctggcaagggaatggcctcggtaaacagaaagatgctgtggagtttcaggcattttctggggttttcccactctgttgtcttcccagaattagttacttacaaaaagaacatggcagccaggcacggtggctcacgcctgtaatcccagcactttgggaggccaagcgggcagatcacgaggccaggagatcgagaccatcctggctaacacggtgaaaccccatctctactaaaaaatacaaaaaattagctgggcgtggtggcgggtgcctgtagtcccagctactcgggaggctgaggcaggagaatagcgtgagcctgggaggcagagcttgcagtgagccgtgatcgtgccactgcactctaggctgggggacagatcaagactccatctcaaaaaaaaaaaaaaaaaaaaaaaaaaaaaaaaaaaaacatggcttagaagttgctgagttgcatattagatcccaggttgatttaaggttaattttgtttttttttgctgttggagtaattttcaggtcactatgttggcttcttggtggcccctggagcacagctggcctcccgtcagtctgagggcctcatggaaaataaacctttagcaggggcacacaaggaaaacaaccggaagtggagagaaaaagtagcaggaaaggggtcccagtacagtcaaagatcagcgagtgagccagggattgagacaatcactaaatcagtggcctccactgtccgtaacaaagtctgaaataagttccataaaatcactattttcccctcctctgtcaccttagctggtgccgccctgcactggagacttgcagaatcattagtctgttcctgcactgctataaaaaaacaccagagactgggtaacttacaaagaaaagaggtttatttggcgcacagttctgcaggctgcacaagaagcatggcaccagcatctgtttctggtgaggcctcaagaagcttccactcatggcagaggcaaagggggagcagacatgtcacaaggcgagagagagcgcaagagagagaaggaagtgccaagctcttcaaacaatcagctctcccatgaactaacagagtgagagctcactcatcaccatggggatggcaccaagccgtctgtgagggatccacccccatgacccaaacacctcctgccaggccccacctccaatactggagatcacatttcaacatgagatttggagggaacaagcatccaaatcgtattagagaatattaaaccaattagggtacagtcaatgaaaggcagaatcctaacagcacagactctgggtcaggacacctggattcaaatcctggttccctcaacatttagccatgtgaccatggtccagccccaggcactctgtgcctcagtttcctcatctgtaagatgaggatggcagcagctaacaggcaagtgaggtgtaaatgaattaatatatatgaagctcttagaaaagtggcagacacacaacaagcactcacaaacctttagtcttttttttttttttttgagatggagtttcactcttgttgcccaggctgaagtgcaatgacgtgatctcggctcaccgcaacctccgcctcccgggttcaagcgattctcctgcctcagcctcccgagtagctgggactacaggcatgcaccaccatgcccggctaattttgtatttttagtagagacggggtttcctccatgttggtcaggctggtctcgaactcccgacctcagttgatccgcctgccttggcctctcaaagtgctgggattacaggccaccgctcccagccaacctttagcctttattattcttcagttcctgcaccctgggagccctacagggaaaacctgtttagggtaaggaagggaacttttccagcttcctgcagccggtgaaatgggaagataattggagacccacagaacaggatttgaattgcagccgctccacatataagttgctgtgagctagttttttattattattattattattattattattattattatttagttttagacaaggtcttactctgtctcccaggctggagtgcagtggtttgatcacagctcactgcagcatcgacctccccaggttcaggtgattctcccacctcagccctgcaagtagctgggactacaggtgcacattatcacatccaggtgatttttgtattcctttgtagagacagggtttctccatgttgcccaggctggtctcaaactcctgggctcaagtgatccaccctcctcagcctcccaaagtgttaggattacggattactgattacaggagtaagccactgcatccggcactgtgagctattctagttatgaagttctctgaaactcgtcctcttcatcagctacatagggtttggcgacttcctggaattgttgtaagaaatgagactacaccatgtaggtattaaataaatgttattttcttcatctcttccccttccttggggtgcaaaggaggcaatcaaagcaaacgctacattcttgcaactctcagaaagcttgtcacccacccagatcaaggcctcagggtgccctgatacatcatggccagctgggtctagtgatgttttcttgccaagaaaccaagaatcagtgcacttcaccaaggcacacccatgtggcctgtcctccagtgctgagatgtcagccattttccacccatggcccagagagcaggaatcaggaaacgcagagaaaacagcgaaacgatcttggcctggagttctcctgagcaaatcctaattctaaccaaaagttatgggaacaacttgacaactacttcatgaggtgatgtccgaatcattagcaagaaagggtagggcaggtcatttttatataaacatctgaaggataaagagtgtagataaatgtcaaaaacaatgcctaaaacggctgcctactgcctgcttacacagctttttccttctttagacaaatgataaaacatcagcacttctgaatataaatcatcttcaattaagacatttctgttggaaaagcacttttggcaggacaaacgaaatatctgccactgttctccaacttgggtctttcaaggttggcagggcgatttatttttgttgattaaacaaaatacaaatggaaagggcctaaaaattgattagccaattaaactcaatgattctcaacaatgaaatgtgcattattagctttgccagagttataaaaatgtctcctagctttactgccattttcacgatttacaccattgatatttgtgctgacagaaagattaaggactggctgatgcaaaatttgtcttctcttttgctggaacggaaggaagagaaacgattaagggcttgggccatttcaggaagaacatctgcactgcattggtaattcttgaaagaacgatctgggttgagcgagggagctgttgtcactcattttgtgtgtacttgttctttagtaaattacagattcactaataggggccaatttgttgagatgacaacaatcataaatatccagattcttcattttctcttctcattttccgtggggatgagtgtccagacaggcagccaaccaaatgatgggtgtcagatgcttttgcaaaatcgatccatgcacggagggacgccatgagcctatttcagtcccgaacagtttttcttaattgccaccatgaggtcaagatcacaactgcaataaatttacttacaatagcccaaaacccagggcagtagaatgctgatgcttcctggtggtcagagcagaaatgttgccggctgctatgaatttttaaacttgattgtatataattgttaatcactgacccattctgcaacccttctgggctggaacatgttgctaggcaaccagttttgctctagatactttctgaaagctagtgaggcaacaaccaagtgtcaactaagtaaacactaaccattagagacaggttcaaataaaaaagggatgcctgacttccttagagcacatgcatctcatgtcctttcttaatgtagacatgtatttcctgcgcttacgacttagcaaataagcaatcttaggttgaactgggggaaattgcccttttggtagctcaatttggcaattcatatgggtcaacctaatcagagggaggtttccacagtctgtgaaatagaagaactattttcctccacaagcgtaatcataattgggctttgcatcaataacacatcacttacctaagtcacatatttcctgaaattctttttataagaaagagttgggagaggcaatctgctggcaaatgcctgaataagaaatcacagttatttttccattttagactaacacaatctgatttgaccgattcttgtacaatatccacgcattccccaccttttcaaatgttcagcgactcaggaaagggaactaaatgcattttttttttttttttttgagacggaatctggctttgtcacccaggctgcagtgcagtggcgcaatctcggctcactgcaacctccacttcccaggttcaagcaattcttctgcctcagcctcccaagtagctaggagtataggtgcacgccaccacgcccagctgatttttgtatttttaggagagacgggggtttcaccatgttggccaggctagtctcaaactctaaatgcatttttttaaaattgagatcaggaaccccagaggacatcctgaagatgaggacagaactgccaactgcatgaaagaagttcatttaggaggaaagaggaaggaaggcagcatgttggtatcatggcatgatgctatccttgggaagcaagtgaagtctaatgactctccgtgtcccaggcagctgagagcctcacagtcaagaaatgctaaagaaacagaatggccctatgttagtttacagaatatctccaggaggttcttagaatgaattaccactgggagtacagaataacaaccagcttaggcagtgcatgcgcacaggtgattaacctcattaggaaagaattgggaaaaaattatgaggtgaagggagaactcgcagtgaagtttaaggttagattgctggccttattgagcaggtgtgaacagctatgcaattttaatttttagcaagcaaaatcaattatttctaggattactacataacaatttataaactagacacatgtaaactttttattgggcaaatggcaaattgccttaaaaggacaatagaaagtttgtcatccattcccagatgagtcctcttaaaatagaaccaagctttctgtttagtctggatttgctttactacctacttgtaattaaaaagtttaaaaaaatcaatccatacagaaacatgtagagttaaaagtgaacaaattatatcctcattgtcactccccagaggtaactgccaatttgtttgcctacttttcacaaaagtcacatcgtaatacatatcctggcgacttgctttttcactcaacattatagcacagaaactacttttaaatggagtcctctggaacatttcagtattcaccagccaacgtgtccacaatttcaaaataaagcttctttttgtttttctttttttgtcttttttgttcaaaataaagcttctaagttggtaagaatcatcccctacccatgagtttacaacaatttaaagaccaccaaaacaatgatcaattattcatctttccaaaagctccaaagcacgctgtcagaagccaaagtgtttcaactccatagatgtgtcaaggaaatccagcccaacacaaatggggtggaggcagctagctgacaccccaaatgcgtggcttaagttggaatcctaaaggaaagatgactacatcacccaaaaagagataaatgaaatccagaaacatcgaagactcaagaaatattaagagccaactgctaaattagattctgaaactatctgctatgcactaggaaaagaatgtgatttctacaaggacatttttaactacctgtgaaagaaatcgtgagcctggtgggaacaagcaactattgagacaaggaacaaaaacagcttcgtgagcattaggactgtcacaactgtggtctgcacaacttagattccacattgcttcaactcaagaattgctaaaccatattctttacttgaattctggagaaaacggtcctaatagctcaatgaacagaattttaaaaagccacttcccctctctagacattagttttcttgtctataaaatgagaggacttgatttaaaaaaactctaaaatctgcaacatgatttattcctgtgattctgtctggttataattatgcatgtggatggatgattggatggatggatggatggatggatggatggacggaggggcgggcggatggacggacggacggatgaatggaaggatggatggatagatggatggatggatggatggaaggatggatgagcggcagaggtctgctggagtgggattgtataggcttgtgaccaattgttaaagttttaggaattttgtagaccagttgatatcatgctgatagcttggaattggcgatgatgggaaaatttataccatagaaatcgacaaaacactacaaatcaggcctctttattcaccttgggagccaatttactaacacgccactgaaggaagtgaaaaaggaaggataagaagaggagaagaaagacaaagaaacagtacctgtaagtgcctacaaagtcctccaagtgggctgttcccccatatctccacattgatacacttcatattttctctgcttgaaaccctattccccactgggattccctgcctgttttccctcttttagaaaagccattcccggcgtctgccctccacctgagatgcccctacacgtgctctcacagcatgcagtaattacccctctccaccctcctagggaacacctactatacagtgcggccattgtccatttagtcagccctgctaaagcatcagctaattctgcacagcagctatgcattttagctcttggtgcttaacgcccaacacaaagacaggcacatagccaccatccaatcaatcgattttaaattaaagcaatggttttagctgcaaggcagagcaaaaacatctgatgataaaaggttcagcctccaagagcagcacttctatcctggtcatcattgggtagcttaagcttttcgggtccactttcccttacattgtgatttaccattaaatcagttaacctactcttgtcacaaagcagtgtagtgtgtcactggcccactttgtttatttctttgctactcaatgacatccacatgtcactatgagttgcatttttaaacaaggaattaactgtctctgtcctggatttacccaagggaggcttgggatgcacccttgggctctattgcctaatacactaaagtgacttggagcaaactgcttaaactttctcatccttagctacccaatccactaaatgaagacagaagactagaaatagcacagacaagaaagaaaccaccacattgccgcatgccagagtaaaggcagggacaccagccagccctgaccttggcagtggctgcaaatggagccacacccttctatcacctttggaaggaaggagggaaagtgtcttagtctccctgggctgccataacaaaatagcacagactgggggattcaacaacattcattcattcattcattcgtttgttcattcatttatttttgagacagaatagtctcactctgttgcccaggctggagtgcactggcacaatcttggcttactgcaacctccgtctcccaggttcagacaattctcctgcctcaggctcccgaatagctgtgattacagacatgagcccccacgcccaactaatttttttgtatttttagtagagatggggtttcaccatgttggtcaggctggtttcgaactcctgacctcatacgatccaccacttcaggctcccaaagtgctgggattacaggcatgaaccactgcgcccagccaacagacatttattttcttacagtcctagaggctggtagtccatgattgaggtgctgtctgcattggtttctggtgaggcctttcttcttggcttgtggacagccaccttctttctgtgtcctcacatggcctttcctctgtacacacaagtgtgtacaggtcctatacactcaacaataagatttaacccagatgccaaaggtatagtcaacacttccaagttaagccatagctccttgttggggtacctgtttctatcctacatcatgaactgcttttactcacacttctgacaccaaatgtgtggggtttttcctcacaccaaccaatgctccaactctctggatgccaactgagggtcctacaattcaattcaggactgacgctaactacccacagttagcagagaacctacaggttaagggctcagtcccacaagattgcccccatttcagacaccagctacagatggagggcccacacttcggcttgaccaactacaaattctggggttcccatgatcctctccccaggctcaataatttgctacaatggctggcagaactcaggaaaacacctgacttactactactgttttatgatcaaggacacaactcagaaacagccaaatgttagagatgcacagggcaatgtgttggggagagcacccagctcccacaccctctctggaaacgccacctcacagcaccaacatgtgttcaccaacccagaagctctctgaattctgttgtttagagatcttacagcatgagtgagtaaatcattggccactgatgattaattcaatctctcgcccctctctcctctccctaaggagaggatggagctgaaagtttcaaccctctaatcacatggtttggtctttctggaaaccagccctcatcccgaagctatcaagaggtccccagtgtaccaaagaaagacattccatcgctccagagattccaagggtttggagaactgtgtgccaggaactgggacaaagtgtgtgtgtgtgtgtgtgtgtgtgtgtgtgtgtgtatacatatatatatacacacatatatatttatatacattttttttcttaccataacaaacatcctttttttttgagtcggaatcttgctctgtcgctcaggctggagtgcagcggcgcaatctcggctcactgcaacctccatctcccaggttcaagtgattctcctgcctcagcctcccgagtagctgggattacaggctcccgccaccatgcccggctaatttttgtacttatagtagagacagggtttcaccacgctgtccaggctggtctcgaactcctgacctcaggtgatccacccacctcagcctcccaaagtgctgtgattacaggcacgcacctggcccatcacacccatcttaaccagaaattctgccttgcacaccaacctaaagatggtgccctcttgtcacctgggctaaatcagcctagcatgagggaatcaagaaagggcttattttctggctctgaggcagtaccagtttgttttgtttctgtctagtgatggcttctggtgggaggtgggaggagagagcgcagagtgggagcccagaagcacaacagaagggtgatgcaatatgcaagctgacgctcaggacacgcctacctgcctgcccatgtgcatctggtaaagtgaatttgaagcttgccggtcctcagctgaaccagaagcacccctagtcaaggccaacgtaacactgaaaacagcatgggagcccttggcagtgacccagagcaatgtaaggactgtgctaatcatgagattataagaagaacagataccatttactgagtagctactgtgccaggccctgggcactgtgtatatataatcatggtcacactggtaatgaaagtgttgcgcccattttacagatgaggatacagaggctcagacactaagcagcctgccccaggtcacacagctggtaaatgaaggacaggaacccaagtgtatctggctgtaaaggccatggtcttggtatcacaccatggcgggctgtctctctggctccttcctgaagtcctcagacttatgtttagaaaaaaggagatattttataaacataagcaaacataagtaggccaaaactaacaggacttgcagcaaatggtgctgcagtccccaccaccatgggatcaagcaccctcccactcctttgttttatgaaatctgaggtcttgaaaagacacatacgcactgcaccccacgcttcaacccgagattcagtgtgtaaaagacagagtgggtctcgtgccaagaagttggagccagtttattttagtctcaatgttaagacagccagcaccaggttgaggctgagaattgctccttctaattaaaactttattttcaaacacatgtcacagtttcaacatggtgagactcattttttgctatgtggatttctaagagtagaagcagctgcttctactgacagtctcttccattcattttgggacaaccagaggatcccaaggggccaagattggttttatatgcaggacaggagcaatgtgagctctgtgagcattcaagatacctacaaaatcaagaaaaatgagacactatcatcaatctagctgatatcgcaagaggcactgcttcatgacagagtccgtgcatccagtcaaggagcagcctgacaaatctgcacataggaccagagacaatgtcccttgtccccatctggtgggaaagtaaggtccaatataagaaactcccaagcagatccaaggcagccttggaaaaagggactgaaccaagtcattatggaaccctggtcattgctggaaaaggagtgagaaaatccaatgccataggctgaaaggttgggtcccctgcagaactcacactttcaaatcctcacctgaaatgtgatggcctttgaaaggtgatcagtcataaggtgcaatcctcatgtatgggattagtgctcttataaaacagaccccaaagaacaccctcactcttctaccaggtgaggacacggcaaaagttggctgtctatgagccaggaagccagccctcaccagacacaaatctgctggctccctgatcttggacttcccagccaccagaactgtgttgtttacatgccacccagtctgtggtattctgtgacagcaacccaaacagatgaagacacccactaagaacactgtaccccaactgcctgtcactttgcgtgtcccccacaggactccacaaagaggcttctgggctggggactgtgtgtgctttgctccccggttcatctgcaggcacatacccgcaggtatgagctcaatacgtcaacacctgctggttgaattggcacaatggagctagcactgtgggtggcctccaaacccagcttgcctctgcctccggggcagggacattacttaaacagcagctcttaaccaatgtgaaaatcagggagaaacacacaaaggaaggactgaggaaggctgaaagagcaaactactatgggtttcaaatcctttagtagtaaacctactcaaggcccagctattaaagcaggccccaaagtccacagcactgtgcatcctgtaatctcagcttcctgctcctccaggaagggaggcctgagagactttctaggaccgtgaccccagccatggccatcttcacgttctgaggctcccccagtacagccagtgctgtgacctaaatgtttgtgccccacctctccaaattcctatctccctgaaatcctagccccttaggtgatggtatcaggaggtggggcctttcggaggtgactgggtaggagggcagagcccttgtgaatgggattagtgtgcttatacaagaggtctcagagtacaagccagtcccttccaccatgtaaggactcagtgagaagacagtcttctacgaaccaggaagcaggtcttcaccagacaccaaatctgccagtgccttgatcttggactttccagcctccagaaccgtgagccaaataaacttctgttctttataaattacccaatctctgaataatttcattctttcagagtagcaaaacacagactaagacaagcaccaatcgtagcataacacatccactgaggaacagagactgaagagcaagtgtagagcaacacgctgccttcccacaaaccagggcatgcctcactccatgcctcgcacacattccaactggtccccagaaaggagtcccaggggcttctcagacatgggctattctcatcctcacatcttacaacacagaacataaaataactctgaccccaagaggtggcactactgggtggacaatttttaactcactgtagcattgtccaggagcctataaaattcatgtgctcattccgagacaaaaaaatgaaaacatttaatacactgttgcctgagagtgtggagagaggaggcagagagaaagcaaaacgctaactctgggataacagatcaaaattcagacctggaatctctaatgaccatattctctctgttggactccagcagccgccattgtatcaggaacctcaataagctctcacatcctcagagacagcctgccctctagagacagcacactcctgaagggaggggcttgtacggcttgtgtcccagggaagcagcaaggtgccaacaattccaacaccaccaccaccaacagccactgggtgccaaccacggccagatactggtctaagcccccacacgtattagcacactaaagcttcgcacctacctgaggggtaggtgctactaacattcctactttgcagatgaggaaacccaggcacgaagggggtgagttccctgtacaaggtgacggtccagctccagaacctttcctcttagctctacgccctgcctaaccacatgttcgcagtgcctggttctctgattccctgattccaagcaaccatcttcacatacacgatctgctcccctgtgggctcagaacaagctgcacaccactgagtggaaaccaatagcacatctcacccctcttccacctgaggattcaccattcaaaaccagttcttgtccacaataaaatatgaactgtggggagggaggtgccataaggcactgtgaaaccagcgtccctttaggaggaatgggagtcccagccatccagcactggaacgcaggacactttccactctggatcatcctggggaaaaaatgaaaacgctcgccctctgacagccagtcagtggcccccaaggaactccccaccatccctctgaaagccagctgcaccggcgtcatcctgccctcaaatctgaggctgcatttagaacctgaagcagcagaaatgagcgtcccgctgtcctgcatcatcctacagggtcaggacgaaggggacaaagggtgcgtcagcacctccaccagcctgtccctccttgggcagcaagatttacaaagcatttaatttaggtccgacaaatattatgtgccctgaggtgctgctctgggcttggttgtgcctttttacattcatctgctcctcagtgaccactgcccaatcacccatgtcacgggcttggcagccaggctcaggtggaagcttcctgcatccgtcctctccactgaggaggggaacaggctgggccatccttcctgatgggaagcccaaggaccagtaaagcctggtggtctttgatgtggggcagtcccagggcagaagcactttgtgcaaagctgcctcgtccacagcctgagatgtaatgagagtcatatcaccactcaggcccccgcatgtcacacgagggagcactgagacctttctgctgtgtggccgctttgcccaactcctcaccggggccacaggagtctccacctagggtcaggagaggacaggcagtggtgctagctaagacttggtgacacagccacagcagttctctccttggaatgtgggatggcagatcttcaggggctgggaaaggaggcactggaggtcacgcctagcttcacaggtgcttgacaacctggctgcccatcagttttgttcagggctgggggcaatccaggtgataaatcctgactggtccagtccaggggtttaaaactcaaggagctttttccgacagggcacatttgatggtgtctgaaaacagctggaggtgggggctgttagtcatgagcagagccctacaaggcacaggacagcccccacgacaaagaatcctccagcccaaaagctcaatactgccacggttcacacgtcccagtctaagcaacttatgacatccagttttcctttgccagaaaccaggattttctttttcttttttctttttttgagaaggagtctcactctgtcgcccaggctgaagtgcagtggtgcgatctcggctcaccataacctccgcctcctgggttcaagcgattctcctgcctcagcctcccaagtagctgggattacaggtggccgccaccatgcccagctaattttttttttttttgtattttttttttttttgagacggagtctcgctctgtcgcccaggccggactgcggactgcagtggcgcaatctcggctcactgcaagctccgcttcccgggttcacgccattctcctgcctcagcctcccaagtagctgggactacaggcgcccgccaccgcgcccggctaattttttgtatttttagtagagacggggtttcaccttgttagccaggatggtctcgatctcctgacctcatgatccacccgcctcggcctcccaaagtgctgggattacaggcgtgagccaccgcgcccggcctttttttgtatttttagtggagatgaggtttcgccatgttggccaggctggtctcaagcatctgggctcaagtgatccgtccgccttggcctcccaaagtgctaggattacaggcacgagccactgcgcccggccacttgatccttttaaaacacaaaaatgtaggaagaaatctatagtctatttgtaactcctgacctcaggtgatccacccacttcggcctcccgaagtgctgggattacaggaaaccagggttttcatccccacttcacagcagagggagggcatgtgaaagagtagtcgctgagaaggcaggagactgtcaggcaggaatgtctatgccgacgctgggcacaggactgagtactccagggagctttacaattggtcctcatagctacccttattctcgtttcacagactgggaaactgaggcacataatgaacacattctgcttagaagagctgggatttgaatccaggcagtccgaccccagtcagtgtattcagggggatggggagggagatacaaaattatatctgtattctgtgtgatcctcatatgtacagacagaaaaaagaaaaggaagaggaggaaggggaaacgggaggtgtattaatctgctctcacactgctaataaagacatacatgagactgggtaatttataaaggaaagaagtttcatggactcagttccacatggctggggaggcctcactatcacagcggaaggtgaaggaggagcaaactcatgtcttacatggtgacgggcaaaagagcatatgccagggaactgccatttataaaaccatcagatctcgtgagacttattcactaccagaacagtatgagggaaaccatccccatgattcaattatctccacctggccccatcttggcatgtggggattattataattcaaggtgagatttgggtggggacacaaatcttatccggaagggagaggaggaaagaggagaacaagggaaaaacatagatatataagagaaaaaaagacaggaaaacataagtgaaaaatgttaacagcagctattcataagtggcaaaattatggataacttttgttttcttctctatgccttcctgtattgtattctctccaaggaaaatgcatgctacaatcagaaaaaaaaaaatacttgccaagcatatatttcaagattttcgtcagcaccagccaactaaacggtaacaataataactgtgggccgggtgcagtagctcacgcctgcaattgcagcaatttgggaggctgaggcaggaggaatgcttgagtctaggagtttgagaacagcctgggcaacatagagaccttatctctacaagaatttttgcaaccttggccaggcatagtggtgcacacccacagtcccagctacttgggaggctgacggaggaggatggcttgaacccaggagttcaaggctgcaacgagctatgattacaccactgcactccagtgttggtgacagacaaggttgggggggagaggaggaggaggaggaggagagggaggggagggggagggaagaagaagaacaagagaagaacaagaagcaggaggagaagaaagaaagagaaagaaagtgagaaggagatgaaagaaagagagagagggagggagacagggagggaaggaagggagggagggagggagggagggaaaattgtgctaagggaaaagtgcagacccccccccccttggcagatgggaggggccaccctgggtctcttggacccatcatacctctacaaccatgaccttaggaagccatcctcaggaagccacgctcacagcacacctgtaaggatccggtcctgaagataaacactccctggagtctgagacagcatgtcagctcctcatccatctcagggcagacagtccccagagggagagccctggaggggaaggtcaaatccccctcccctccccatcccacttcatctggctgttcatgcccatgctcaaagcacttgaagaaacttccagaaaaacaaggtttccggatcattacaattgtctttcagcagttttattaactggcaggagtaagaggaaaaagaagacttttttatccagcccttcatatgaaagtttgttctaggaaaaaaaaggaaaagaattctagcgttcactgaaaagtgtgcctttccaatttttttcccaaaaaaacttgtacatgtgttactgttaattctgtttggagtctccttccaccataaaaacctactgtatgcagaggtgcccattatctaataaatcttttttgttattattcttgttaactcagagaggcaaattcttctattcctgccctgtgatcatgacttggggtcactgtgaggccctctctaattctactttatgtaaaataattaagtggctttataaaaaaattcttacagatatcctcaagtttaaagaagaatctctaaagtttaagataccacacccaaaaatgcagagattcaaaatacccaaatgtcaccattgattaaaacacgaaataaaatgattttttttagactgccagcaggactggacctagcctttacataataataataataaatgcctagttgccttcccaagagcaccccttggatgcctccctccctgtcaacagaacactgatcatccaagttcattctcaggccaggacagactcagggaaccgccgctgcccagccccagcctgaaataagccagatataaaccaatgagagcctcccattactccttgcctgtgattgggttagggctggccatgtgactcagctgccaccaatggaacaagacaggaagtagactggggagttccaggaaggattctttgcagatgaaaagaggccaactggtagaaatgcctgcctcttcattcaagtgttgttgcaattactggcagtgctgcaactccagctgccacccctgctattgtgtagaaataagcccaaggattggccgagcgtggtggctcacgcctgtaatcccagcactttgggaggccaaggtgggcggatcgcgaggtctggagatccagaccagcctggccaacatggtgaaaccccgtctctactaaaaatacaaaaattagccgggcgtggtggtgcgtgcctgtaatcccaactactccagaggcggaggctgaggcaggagaatcgcttgacctagggagtcggaggttgccgtgagccgggattgcgccactgcgctccaacctggctacacagtgaaattccgtcgaaagaaagaaagaacgaaagaaaggaagggaaggaagggaaggaaggaaggagcccaaggatcaagcaaagaacctgaggacagtggagtagaaaagtggaaagaactcatgattctgatgccatcactgcattaatgaactaaccttggaaccaccatgtgagatactaaaccccatattgtttaaggtatgtttggttgggtgttttgtttctagcagccaaaaccatcctaactgatagaaccctataccaaggctcattactaagagtctggaatcttacaaacatattaaagccaaaagacaatgtgtcagattgtctggagctgatccccagcaaggcacagagaagaacggagaggacaggcgaccaggaccttcacgatgacttcctgtcggtcaccaacctgttttccaaccctcctttcttcacactctgtctgtaactcatcctaacagaaggctgaccaactgatatcttttatgacatattcaagaggtagaaaattgatgctttgtggccatctgagaaggagcagtgaaagccaggattcaaaagctctctttgctttcgcaatttatagactacccactgctaaatgtcatccccaagtttagacattaaataaaactgattgatgaatctacgagactttggagaagaaaatcttccaaagcaattttttcaaggatggaggttggtgggggagacagtgctagataaatcagtacataaatcatcttgttaaagataagaatttcacgtaggactctccatgcttaggaaacagacataaacaaaagataacaccatctgactggatagaaaatttctctactatgtgcctgcaaggttattcttcaagaactaacttcctgagactacataagcattaaaaataattacttatatatgtgtgtatatatatatgtgatgtgtgtatatatgtatgtatatgtatatgcatacgtatgtgtatatgaacacacagagagagagaaagagaggaaaatgaatctcaagaccccaaaatcgttaagccaagggagaagtcaagctgggaactacatcaggtaaacctgcctcctattttattactaaataagacagctaaaaagattttaaaaagctacatacctccctcacaatttggaatttcctggtgggcctcaagatctttacccgaaaacagttctgaactgaaagctgatcttcacaggtgcaggaatgaaagtcatccctctgctcacctgagacgaaggcatatctgattgcttcctccaccacactgtttatgtaagaatgcagattcactgaaccagactgaattgtgtaaatttacacaaagaacagaaaactttaaagactgatcaaggactcaaaagaatgcaaccttttgtctcttatctacctatgacctggaagcccctcgcttagagttctcccaccttaccagaccaaaccaatgtacatcttacacatattgattgctgtctcatttctccctaaaatgtataaaagcaacctgtgccccgaccaccttgggcacaggtcatcaggacctcctgaggctgtgtcatgggcacactgttaatcttggcaaaataaactttctaaattgattgagacctgagatattttgggttacacacacacacacacacacacacacacacacacacacacacacacacgttaagtgaaaaaaatccatctatcatatatatactgattccaaaagaaggtacatacgtgctcagtgaaaagaccagaaagaatctggaggaataaataattttttaaggtgtgttttaatgaagttgcctttttaatgaagttaatagttatgtattttttttttaaatgaagtcgtttaagttgatgatgagtatctgtatgttctcagatatctccagtgcttggaactgtctgttcatcaaaaccactcactgaccttcttacctttattaagctcaatcctgcgtaatctgagggccaactacattccaggtaccatgcaggctctgcaaaggattcagttatatttcagatacagccctagtggccttgaactctttctggaaggtgagaaatgagggaaagcatgaaggaagatgaattttaccttctaagaatgcataatctaattaggagcagggaggagtaagtgaagggtaaatacagacacatataacctaagacacacaatcaatcaatgataaaaagatataaaatgatagctttaaatgaggaagagatcgcattgagaatttcaggaaaggtgtcatgagagaggtggcatcggaaatggaaaccaaaggatggaaattaggtagactggcattttcagagggtagcaacagcttaagcaaagacaaaaaaacagaaaactttaacaagaattctgggaacaatgtagagtatcaagataagctggagtgcagggtatgtataggcaagtcatgggtttagaagaaaagcagatggcaagacctgcaggaccagatgccaggctgccttggtttgagaggcaacgaagggttagaagaatagcctggcttggcagtgacacgtcggagctgtgctttagaaataaatggatccagcagcagcaggtgacctggtctggagctggagaagggaccagctggtggcgtctgcactcactcagggcagaagtagggaatgtataaccacagctggcagcacagtgggtagagcgtagacagctccacagatatttgttaaagtgagttaggtttcttatgggcaggaattagatctatttcttttttaaaaaaaaagacagagtgtcactctgtcacccgggctggagtacagtggcgcaatctcagctcactgcaacctccacctcccaggttcaagcaattctcatgcctcagcctccccagtagctgggattacaggcatgtgccactacgcccagctaatttttgtatttttatagagacagggttttgccatgttagccaggctggtctcgaactcctgatctcaagtgatccagccaccctggcctcccaaagtgctgggattacaggtgtaagtcactgtgcccggcccatctaataatttatttctgtaccctctacaggctctgaacacacataaggcactaactaatgatgccagctcctcttgcccccttcttcttccacaagtgatccaatccaaaaagcacacagatgaagcaccaagatcaagacaaaccctcccttttcctatttccaatgaagaatcctctttctcccaaagcaaacatgaggaaagcacagaagctgaacaaacactccaggaaagggctatgggtccaagaaagaataccttatcagcttgatatgaaaaagtaagatgctttccacctctctgctcctatgcaggaaaagtcagcgtagaagactgctaaaaatcagccaggcacagtggcttacgcctgtaatcccagcactttgggaggccgaggcaggtggatcacacggtcaagagatggagaccatcctggccaacacggtgaaaacctgtctctactaaaaatacaagaattagccgggtgtggtggcacatgcctgtagtcccagctactcaggaggctgaggcaggagaactgcttgaacctcggaggcagagattgcaataagccgagatcgcaccactgaactccagcctggcgacagagtgagactctgtctcaaaaaaaaggagtcctaaaaattaacagaaatgtatacccacctaactagcacaaagcaacacctgcagaaaagtgcaatagaattagaggttctctgagaacgtgcaaggatgtcctcattcttcaggccaccacactgaagtacttaggcagcaaagggacgtcatgttgccaaaatactctaaaataggtcagggaaaaaacagtgtgtgtataagtgtgcatatataaatgtgtaggaggataaatgtgttaggcgtaaaagtgtgtggatacatatttagataaatatagagagaattataaagcaaatgggatgaaatgcaaacaactggtgaattttggtaacgtgtatgtcttaatcagcttgtgcagctgcaacaaaatacctgagactaggtaatttataaagaagagaaatttattttctcacagttccggaggctgggaagtccaagatcaaggcaccggcagattcagttgtctggggagaactgctttctgcctccaagatggtaccttttgatgtggcatcctccagagaggagcagcgctgtgttctcacctggcagaaggtggaatggcaagagagccaaatgccgcgtaaagtctcctttataagggccttaatgccattcacgacagaggagcctccacggcagaggagcctccacagcctaatcgcctcttaaaggccccacctcccaacaccatcatactagaaacacctgaattttggaggggccacattcgaaccacagcaatacattcatgcactgcacgatgacatttcagtcagtgacagtggtctgaaccatatacgacagtgctcttattacaatggaggccaggcgcagtggctcacgcctgtaatcccggcactttgggaggccaaggcggggcggggggatcacctgaggtcaggagttcaagactagcttggccatagtgaaaccccgtctctactaaaaatacaaaatttagccaggtgcaggggcaggcgcctataatcccagctactcaggaggctgaggtaggagaatcacttgaacccaggggttggaggttgcagtgagccgagatcgctccactgcactccagcctgagtgacagagtgagggtctcaaaaaaaaaaaagattacaatggagctctcactgcccctgaagagtttcccaaaagacaaggacaagacgtggaggtggacaacagtgatactgctggcctgctcctgtgtaggcctaggccaatgagtatgtccgtatcttggtttttaactaaaagtttaaaaagttaaaaaaataaaataaaatgtttaaaagtagaaaaaagtgtacagaaaaaggatgtaaagaaggagaatactggccaagcacggtggctcacgcctgtaatcccaacacattgggaggctgaggcaggtggattacttgagatcaggtggtcgagaccaacctgaccaacatggtgaaaccccatctctaccaaaaatacaaaaattagctgagtgtgatggcatgcaccagtagtcccagttacttgggactgaatccaggagacgaagtttgcagtgagccaagattgcatcactgcactccagcctgggcaactctgtctcaaaaaaaaaaaaaaaaaaaaaaaatggaaactatcttttgtacagctgtgcattgagcttatgttttaaacaggttacaacagagtcaagtttttaaaaaattaaagtctgtgaagttaaaaagctacagtaagctactgttattattaaagaaaaaaaaatttttatacatttagtgtagcctaagtgtccaatatttatagtctattttagtgtccagaatgtcctaggcctttacattcactcaccactcactcactgacccactcaccgcaacttccagtcctgcaagctccactcatggcaagcaccctatacgggtgtagcactttttctctttcattctgtatttttgctgtatctttcctttgtttagatgcacaatttttccatggactggggtggggggtcggggaggatggtttcagaatgaagctgctccacctcagatcatcaagcattagttagattctcataaggagcacgcaacctacatccctcgcatgagcagttcacaataagagttcgcactcctatgagaatctaataccaccactgatctgacaaaaggtagagttcaggccgtaatgctcacccacctgccactcacctccagctgtgcggccctgttcctaacaggccattgaccggtatcggtcaggggttggggatcccctaggctatcatccagcgtaggtgtgttgtagggtataccatctaggtttaggaaaatacaccctatgttgtctgtaccatgatgcaattgcctaacaacacatttctcagaacatatcccaagcgttaagcaacgcataactgtgtatgaaagttttttacattattcttgctacttttctgtaagtctgaaattgaaataatatcaaaacaaatagttataagagtaaggaagcgttatactgatatgatctttaaaaatatgcaaaataaaaaaatgcaaaatgagatgtatggaatatcaccattcatttcagaagtggagaggaaaaggtactgatatgtatttatttggatgttatatccgtaatggcagataagaaactggtaccattactacctctttgtagaagggaacagggtagttggagatggagtggaatggagatttttcactatttacttttatatattttgaattttgaaccttgtgaacatattgtgtattcaaaatataaataaaggaaataaaattactttgaaaatatgttcaaggaaaataataaaataatagcgcgagcagacagtttggagtggcttaggccagagacacataagaaatcagctaaaagccacctggcagggtgctgcccagatgtcacctcatgagccactgtgcttggagagttgcctgtttagaaagggcgcattccagacaagtaaagctgggggcttggaaaaacatgttctatcaagtttcagcctaaattggacagaactttcacataaaataaattatgtgattgacttacaagccacaattccccatagccctgttcccccaagctgatattgctggttctgtgactgaatcatgtgacacactgcacatctgtcctccatgtgactgtcacaacctgctaaagccctcaggaggatatcccattccttggaaggacaaacccgaatgtaaacagcatccaaccctcttcagtggcagcctccctcccttggagataacagccaacaagccatttggtggtgtgtcactgaaggaaagagattcttggatctacgcaagagctttccaagatgatcacagattattccagcagcaagcaattctgaatggacaaatgaactttctcaccagcctagactcaccacgttaaacttcatgggacttgagcaagctctcagacaaccatagagaggtaagaaggtactactgtctgcagaagccagactgagaagatggtgagctcatctggctttccaattgtcagaacaccaggcaagggaccccgcagcacccccactctcccttaaggaaacccacagttgctctcccagccaagatcccggctccatgacccagtctctagtgctttggggaaggatttgattgggcacacctgtgcatgtttgtaccacatgaactgtagcctgaaatgtgattgatatttgtatttgaaaaagggtgtgggactagtgagaagtcaagacatgggatgagaaaacagggtcctggccagacacggtggctcacgcctgtactgccagcactttggaaggctgaggcaggtggatcacctgaggtcaagagttcgagaccagcctggccaacatggtgaaaccccatctctactaaaattataaaaattagccaggcgtgatggcgggtgcctggaatcccagctacttgggaggctgaggcaggagaattgcttgaacccgggaggcgggggttgcagtgagccgagatcatgccactgcactccagcctgggctacagagcgagactccatcaaaagaagaaagaaaagaaaagaaaagagcgaagagaagagaagggaggggaggggaggggaggggagggggaaaggaagaaaggaaagaaaagagggtccttttcccccagaacattaagatgatgggatctatttatttggcaaagataccttgagcattggctctgtcagtcagtgagcaaagcctggaaagacagagctgaggagctcctagtccagtggagggagacaaacaccaatcacaagggatggggaaggtcctcaccccatctccctggggtgctatgaaggagacacatttacacataaatgacatactttaacaaagatacagccaggcacagtggctcacacctgtaatctcagcactttgggaggctgaggtggacaaatcacttgagcccaggagtttgagaccagcctgggcaacacggtgaaatcgcatctctataaaaaataccaaaaattagccaggcatggcagtacacgctgcacgggggcatgaggatcacttgagaccaggagttcaaggttatggtgagcaacggtcacgctgctgctctccagcctggaccagaaagcaagaccctgtctctgaaaaaaaattaagactaaaaaaaaaaacgctgagcacggtggctcacgcctgtaatctcagcactttgggaggccgaggaagacggataacaaggtcaggagttcaaaaccagactagccaacatggtgaaaccccatctctactaaaaatacaaaaattagccaggtgtggtggtgtgcccctgtaatcccacctactcaggaggctgaggcaggagaattgcttgaacctgggaggcagaggttgcagtgagccaagatcgagctactgcactccagcctgggcaacagaacaagactccgtcttaggaaataaaaagaagaagaaaacaaaaaaaaaaacagctggatgcagtggctcacgcctgtaatcccagcactttgggaggtcaaggcggcaaatcccctgaggtcagaagttcaagaccagcctggccaacatggtgaaaccctgtctccactaaaatacaaaaattagctgggcatggtggcgggcacctgtaatcccagctactcagaggctgaggcaggagaatcacttgaacccaggagacagaggttgcagtgagccaagatcgcaccattgcactccagcctgggtgacagagcgagactccatctcaaaaaataaaataaaataaataaaaacaaagaggagtggtagcaaaggaggacaagtacacccttggaaaggccagcttgctgtcagaaagctggattcgggcccagctcttcactgacaggcagcatatgactgggtcagctacttcactcctgaaactcagttttctctggaaagaacaacagcaaccttcaaaaaggtgaagctgcaagggtctaacacagcatccgccatgcagtagacccttggccaacgaggcttttcccctttgtcagctgacatcaggccagcacacaagtcctctgttaggggtttaaccgggtctcccagaaagatatgttgaagtccttactttacatccccagtagcttggaatatgaccttatctggaaacaaggtcactgcagatgtggtcaagttaagaagaggtcacactggggcacagcagtcttttaatccagtatgtttagcatcctcaggaggaggacaaggagagacagagacacacagggatgatggaggcacaaaatggagggaggcctctacaagtcaaggaactccaaagctttcagagaaaccaccagaaactaggaagaggcatggaactgacggtcccacggagccgtcagaatgaacctacctggccgacatcttgattttggacttctggcctccagaattgtgagaggattcatttctgctgttggaagctaccagtttgtgctatgttataacggcagtccgaggaaacagctacatcctcctcccctctacaaaaaccaaattcttgacttgcctgagaaaacaggacacttttacaaaggcaactaataaataacatttcaggaaaggctatctttgctaacacgccctggcagcagaaagagaaatgtgggtgttttgttggttctttttttttccctctctcctcctccctgcccctctcatattggactcgccaccatttggggttaatgattcccccaagggataaagatacagcgaaagaaggaccttcagatgcagtccagaaggtcaggaccacacattccattactgcagaggctggttcacaccccacgtacattgcaccctccaggagccccttaccaatgctgctcagttacaacggtgaagaaccggggtgctggattttttttgtttttaaaaacggaatgggctctcagcaagccacaggtcaatcaggatggaaagaagagaagggggagagagtcaacgcaaagcagaaaatcacttttctaggcatctacacaactaggaggaaaaaaagtgacctttgggcctgattgaccaaagtgacccaagctcgacggctttctttggcctttcgtatctacctgttgttctctcaagacaaaactggtatttctcactggaacccaccaaatccatgaagtggtttttgtttgtttgtttgtttgtttgtttgttttttgagacagggtctcgctctgttgcccaggctggagtgcagtggcgcgatctcggctcgctgcaacctgcacctcccaggttcaagcgattctcctgccgcagcctccagagtagctgggattacaggcatctaccaccacgcctggctaatttttgtatttttagtagagacggagtttcaccatgttggccaggctggtctcgaactcctgacctcaggtgatctgtccacctcggcctcccaaagtgctgggattacaggcgtgagcactgcgcccagccttgtaaagtggtttttaccaacaacaaagaagccacttgcttggaaatgtgggaccaacgggctgaatgccccatccgcagccacctgggaatttaatcagggtaagactaagagcaggcactgccttgtccatcctatttattctcccccaggtttcacttagctgttttgagagctgggggaaagttccagtgtcaaggaattcaactggcagaattaatgactcaatagcttcagttctaataaggttaccaaaccagtccgccaagtaacatatcttaaagaaaaaaaaaggtaaaaggagaaataccagagaggacattttaggggcccacaaacactgtcaggaaggaagcaattttattatttgttttttatttatcttttgagacagggtctcgctctgtcgcccaggcaggagtgcagtgaggtaatctaggctcacggcagcctcgaactcctgggctcacgcaattatcccggcctcagcctcccaagtggctgggattacaggtgtaagccaccgcacccagcctggaagcaattttaagagagggctgacttccatgtccattactaccacaaccaccaccatcacctaccacttcctaccaccctcccccaaatctgggtcagcaccaagcatgaggaaaatggaactaaggacaggatttcagctaggaaaaaaaggagatcacgaagcctagataatgagtcaggtgagaggagtttctgctccattcaggacgctgccttaagatgtattatgcctagatcatccgtcttgagtttcctggttcactccggattgcaccctttaaagcatttcgtagtttccctttacaatcagatcctaatgattcaaggattgctaatccaggtggctgtactctccaattttggttgccagccatttctctgcttaggagcatctcatcaaagggagagcaaaggaagtttaaagaaagccaatcagtcaagcaaggcaccctcacattccaagctcttacttgagttaggatgatgaaattgacttggcaggggccaaatcaaaaatagaggaaaaaaaaggatgggcgcagtggctcacgcctgctgtgagagccacaccctgggctctgatgtatgttgcagtgacatggctaaatgtaccaaggtcaaaattgtccataatccgctattgtgtctcccttaggaaaatggtgaagaaggctgggtgcggtggttcacgcctgtaatcccagcactttgggaggctgcggcgggtgggtcgtttgagatcaggagttcaagaccagcttggccaacacagcaaaaccccgtctctactaaaaataaaaaaaatagccaggtgtggtggtgcgtgcccgtaatcccagctactcaggaggctgaggcacaagaatcacttgaacccgggaggtggaggttgcagtgagccgagattgtgccactgcactccagcctggccaacagagtaaactgaggaaagaaaagaaaaagaagagaagagaagaggagaaagagagaggaaggaaagaaggaaggaaggaagggagggaggaagggagggagggagggagggaaagagagaaagagaaagagaaaaaaagagaaagagaaaggaaggaaagaaggaaggaaggaagggagggaaggagggaaagaagagagaaagagaaagagaggaggggaggggaggggaggggagggacctgaaatcagcactccaaaatacacttgctttttctctgacaaaaccaaaacggcaggctgtagggatccagcactgtgcatcctgcatgaaaacagtggctgacagtgtcaggacccacaatacctcttcatcatcacagtaaagtccgccctcagaagactggagaggttgaaagaccaggagaaacaccaccatttgagacatcactagcctaaaataaataggttaatttatgtttaaaaaaaaaaagtgaggaccagactatgaccccttccacgtccaaaattctaagcacgatttgatagactaactatcctaggtattccaatggaagagttgggatcagcccatccactttcccagagcagatctctaatgcttatatggtatcattcacaaagggataaaagagtaactgtccctcctgccaatccctgcccaaccttacagtgaacaagagcctgaatcttccagatgaagcatgagcgctctccaagttaagcatgggcgtgcaaagggctggcatgctgtctgtcttgacttgctgaggactgacaggttcctgcttgctggcatatgtgttacaaggcaacccaggcctacaatgaacaacagcctgagaggggttgcctttgcaggtaaaagggagatctgatttaatcttcacagagatgcaagggtgcatccagaagagggggcatggccgctgagaagtgaggaatccaaccctttggggtaattcattccccgatacttttcaaggatgggctgccactatgtcaaaaagaaggtacaacaagttcgctacctggcaatttcagaagccaccttgagggcaatgcacccctcctccaagttcaagaatgccactgtaagaagcagaagcaatatggggagctgggatctaggtcgctcctctgttagatctgaaaagactaaaacatgaaaacttccaaagctggtaaagctcctacttcccagttagctcaacccagtggaaccaagggtagttctccaggtcaatgtctctgactgcaccaggggctgatgacttctgcagtggagggggaaatgcagaactcagtttggttttttctacgttcagatcccaagtcatccctttcttctttggatgttaaagtagtattcatcggcctgcattttttcaggatctcatgcttgctaataaccactgttactaaaaaaaagaaaaaacttctagagaaacctgacccttctcccagaagctaagaacttgacagctatggtctcctccacataatagatactcctgccctgatactgcaagacagaaatgaccacttttaaagaaattagcaagtaccttcaacaaatttgttattagcctctgacagtcccgcactggagacctcagaaacaccaaaaataaaaagatacaatccctgtcataaagggacttaggacacagaatgagtgaggaccccatgggcctaaagcagcatcccatggtgtgtagctaagaacaaaccagattcaatcacaactcagccactgattggccgggcgaccacaaggccaagcaagctacttaaccctcagtttcctcacctacaagatagagatcgtgaatccacctcacagtgttgacataggattcaatgatataactcatgcaaaaaagcttagctctctacaggagatattatcatcagcatgaataattagattctaagaccaagaagtataaatgttaaaagatatgaaaggtcaaggaaattttaaaactagaagacctggaaactggataaacaaagagcaaagagagatcaagaaaaaaaaaagtaaatgtattcttcttaagccaagctcactggtgtcattcacaaacacagggaattcttgaccaaaaagatgactaagataactacttcaaccagcacactctggagcccatggaattggaagagcactcattgagtgtagacattgcagagaattgtgggggaaaaaatcagtggatcagcattaccgtcttagatgtttaaagcctctgaagttttcttagatggaaagatcatcaaaggttactattccagctcattttaaaagctgatgccaggccgggcacggcatcagattttttttgtaatcctagcagtttgggaggctgaagcgggcggatcacctgaggtcgggagttcgagacgagcatggccaacacagtgaatgaaaccccgtctctactaaaattacaaaaattagccggacgtggtggcgggtgcctgtagtcccagctacttgggaggctgaggcaggaaaaatgcttgaacccaggaggcggaggttgcactgagccaagatcttgggccactgcactccagcctgggcgacacggtgagactctgcctcaaaaaaaaaaaaaaaaaaaaaggctgatgcgcacaacaggaaacgaccaacttgctcaaggtcccacagcttgctggagacaaagctctgattacaacccaggcactgatggctgccctcatagttttctgcccagcacgactcctcttcacagcaggaaatcagccacctacacaggctccctccccatttccatctctcttcccatccctaatagcactctctctaaactcacgcactctcacacacgtacacacacacacacacacacatatgcatctgcatctttttcctcccttccatatctttttttaaggtataagaaatacatataccataacatctatcatcttaacccttcttaagtgtacagttcagtgttattaagtacattcacattattgtgcaactatcaccaacatccatcttccgaactctttccatcttgctaaactgaaagtctatacccgtccaacacaaactcccttgaatttcactactctaggtccctcatacaagtggaatcacatagtatttctctttctgtgtctggctaattttacttaacgtaatgtcttcaagattcatccatgttgtagcatgtgtcagaatttccttcctttttggccaggcacagtggctcatgcctgtaatcccagcactttgggaggctgaggcagttgaatcactcaaggtcaggagttcaagaccagcctgggcaacatggtgaaaccccatctctattaaaaatacagaacttagccaggcatggtggcgcaagcctgtaatcctagctacctgggtggttgaggcaggagaatcactttaaccgggaggcagaggttgcagtgagccgagatcgtgccactatactccagcctgggcgacagagggagaccctgtctcaaacaaacaaacaaaaaactcccttcttaaggctaaatcatattccactgtacgtatacacattttgttgacccactcaatcaacagacacttgggttgcttcctcttttggctattgtgaataatgctgttatgtgcgtgggtatgcaaatatctctctaagtgtctgctttcaattcttttgggtagagacccagaagtgaaattgctagatcatatggtaattctatttttaattttttgaggtgcatgcacctttttaattttttttttttttttttttttttttttttttttttttttttttgagacagagtctttctctgtcgcccaggatggagtgcagtgcaaggatctcagctcatgaaacctctgcctcctgggttcaagcaattctcttgcctcagcctcctgagtagctgggattacaggcacctgccaccatgccccgctaatttttttgtattcttagtagagatggggtttcaccatgttggccaggctggtcttgaactcctgacctcaagtgatctgcccacctcagcctctcaaagtgctgggattacaggtgtgagcctgtaaaagggaccatgtctggtcccttttaaaattatatcacacttctccataactacaactaatagcaaaatatgttttcttttttattcaactaatgtttattcagcaccaattatatggtaggccttgggctatgtacctgggatacgatcaatcatgacctaaagtcatggtccccgtcctcttgggactcacagtctagcaggagggacagacaggaatcagatcacaggcagctatctggagcagacagacaacagtgaaactgacgcaggcagcagtaactctgccatcaatcatattatgggaaggtgttttagggtggtagcccaggggtgggtgtgtgctgtgggttgaattgagtgccttaaaagatatgctgaagtcctacctgtcctacctcccagaacctgtgactgtgacccaactggaaatagggtcttcgtagacataatcaagttaagatgaagtcatactggcttaaggtgggccctattctaatgaccaatgtcctaataaaaagagggagacttggacacagacagacatggggaaggaggacatggaagacacagacagggacaggaaggacgcagctgcacactgaggaagccaccagaagctggaagagggaaggacaggttcttccttagagccttcagagtgaacgtggccctgctcacacctcagtcgtggacttcgagcctcctgaactgtgggagactacatttgcattgcttgacgcttcccctccatggtactctgttagcacagccctaggaaaccctacagggtggaacgtagtcctaggttggattcttttctacctttccttggagtggggaggagagagatagagaaataaagaactaggttttcatattgaaatttcttttttttttttttttttgagacagaatttggctcttgttgcccaggatggagtgcaatggcacaatctcggctcactgcaacctccgcctcccgggttcaagcgattctcctgcctcagcctcctaagtagctgggattacaggcataagccaccaccacacccagctaattttgtattttcagtagagatggggtttctccatgttgccaggctggtctcaaactcctgacctcaggtgatctgcccgcctctgcttcccaaagtgctaggattacaggcataaaccaccgcgcccagactcatcttgaaatttctaaccaactttcgatcctggcctgtggacctgggtctcagcttctgactctgtagggtgagtgtgcccttagactatatccgagatcctagcgttgaagtggtcctaaggttcccacggagtctttttcaagctagcccacagggcagttcctgatcacccccatgggagacctatgcgcacactattggtattaagatatgacttgctgcaggacatttagcaaactgggctgtgctacgaactcacctgcccctcccccatgccttgtcatgaacaaaaatgcctccacccccatgtctagagaagccagcaagaggtgagaccccctggagggaatgagtcttaaagctgggtcatagagcaggccactgattttccatgagatctatgtttgaatacatttggagtatctgcgtgcctccgtggtggagattatggggtatggagggcaccctgcacaacggttcttcaggactacccgacaaaccctacctgctgagactgggaggtcaccccagggagactcacccatttagggaaccactactacagctgggagtgtctcaccctgttggatggatcaggcatggcatggggaagcctcctgaatatgacatggaaaaaggaagcagacatcccccggcagaggtgcaaacccagctctcctggagtcctgcaaagcccccaggacccactcaagggccatgtgagcaccaagtcacctgcctggcacaggcgccacttcccacccgctcctcgggcacccaactgttccagcactcatcactgcacctcctccgccactgtcaacacaaacacccacacccaggcaggaagtaaaaataaccagccgtttcatagcatgtctcatgcctcatctccttcccgaggcacgcctctctcagtcccctgcaggcatcaaggacccacagagaggagagagaggcagggagttaagacagttccaatgccctgtgctttgtctacactgtcagacagagatcatctctaaaagggataaaagtcagaggcccttcccttgcaacaaagacggggctgcatgtttctctctcaggggcgccccctacctggaaggacagttctttctaccagtaaattccacgtgcctggagagccgcagaacttcagggatgagtcagccaattaccgctgggcccctccccaccacgagagtgtgtttatctatctcaggcagaggtactagtgcccaggcagaaaagacatgaaaatcacaaccccagaccagaactagcatcttttatgaggcacagccatcaaaggacctcctgacagcaaagcctggtgctatggttctgaagtgcatcccccaaaaagatatgctgaagtcctaacccggggtacccgtaaatgtaactgcatcagtttgctaggcttgccataacaaaataccagagtctaggtggtttgaacaacagcaacttattatcttacagttctggagactggagtccgcgaccaaagggccagcagggtggtttctcctgaggcctctcctcggctggcagatggctgccttctttctcgctgtgtcctcacacagcctctcctctgtgcgtgcacatccctggtgcctctatgaccaaatttcctctactcataaggacaacggtcagatggattagagcccaccctaaggacctcatttgcacttcatcatctctttagaagtcctgtctccaaatacaatcacattctggcgtaatgagggttcgggattcaacatatgaagtttcaacataggaagttttgggggaacacatttcagcccataacagacctcatttgaaaactgttgggctcacacctgtaatcccagcactttgggaggccaaggcggatggattgcctgaggtcaggagtttgagaccagtctggccaacaagatgaaacctcgtctctactaaaaatacaaaaaattagccgggcgtggtgacaagcacctgtaatcccagctactcaggaggctgagacgggagaattgcttgaacccaggaggcggaggttgcagtgagttgagatcatgccactacactccagcctgggctacaagagtgaaactccatctcaaaaaaaaaaaaacaaaaaaaactgtttactttttatgatcatgtcttgcagatgtaattcattaagatgaggacatattggagtagggtggtccctgagttcctatgactggtgtctttgcaagaagaaaaaagacacaaagatacacacagtgaaggtaaccatttgaaagcagagacacataggacaacgccatgtggcaacagaagagagacaagtcaaagaatgccataggttgctgggaagcaccataagttaggaaaaggcaaagaaggattctacacagcatcacaggaggaaccaatgccgcgggcaccctgagtctgggcttgtgccctgcagaacaacgagagaataaacttgtgttgttctaagtcaccctgttggtggcactttgttagggcaaccctaggacactcagccctaggaaaccagggtgagcagttggctgggcactaaaggttcagacctcttgaggccgcttagccatacatagaaagcctccgtcaacactatttccttctaataaaattcaataattgacttgcaatacagcctagcagaggaattcttagtgcggactctgtggccagactgcctgggttcagaaccttggtctgtcccttaccagacatctgaccttggccaagacacacccccagggcctcagttttcctcatctgtaaaaagggcatgataataatagtatctagctcatcctgctaggaaaatcacatgaggcaatacttacgcagcaatcaatgcctggcaccgagtccaagctatgcatgggtttgataagtcctgacaaagagttatgtcaccgacgtatgcttctctcagttgtatgtgaaatcccgaagaatcctgggtcgggcctccccgatcctggactgatcatgtgtaaccttaaaattcaccaaagttccaggaaggcactttgcagaaagggaaaatgtaataatacaaaggaaacattcctaaatgattaaaatgtcccaaacttacacctcgttgctagggcaagggaaaaatattataacaacaaaatttaatttgagaatctatttgaaaaatcagctggaagtgacaggcagaaatagacaagagagacaccatctcagccatgggcacgaaggagagtggcaggttagggtcaagtggcaaaccacagcccgtggcaaactcctgggtatgtcacacacaaaaacgttgacaagacatttacctaagctgcctgggatgcactgaatttccttatcctactgcaatttattttatttgtttattttattttttgagatagggtctcactctgttgcccaggctggagtacagtggtacaatcttggctcactgcagccttgacctcctaggttgaagcgatcctcccacctcagcctcccaagtagctgggactacaggcacatatcaccatgcccagctaattttttttcactttttgtagaggtggggcctcccctgtgttgcccaggctggtctcaaactcctgggctcaagtcatccacccgcctcggcctcccaaagtgctggaattacaggtatgagccatctcatctggccacaattttatttttactgttgtcacaacagcactatataaatcaatgaatggcctgtgacccagtttgaaaactacggacacagccctctgcaaaatccttcctacttcattttttcagaatatttaactccagggactaaattctgaggaaaactcccgggaccttcttttcttttccagagtcaaagacagtcctgtctttttcttttttcttttcttttttttttttttttttgagacagggtctcactctgtcacccagactaaagtgcagtggcgtgatcttggctcaccgcaacctccacctcccaggctcaagcaatcctcccgcctcagactcccaagtagctgggacaaccgttgcaagccaccatgcctagttaggtgtttttttgtttgtttgtttgtttgttttgtatttttggtagagacgggatttcaccatgttgcccagactggtctcagactcctgagctcaagtgatcctcctacctcagcctcccaaagtgctgtgattacaggcacgacacacggcacccagccaaagacagtcttttctaaccatagggaaaactataatgttctaaaataaacaatatgagactggacactaaagactatgaggaaacaggcttccagagggctaactgctctatgctaaaaattcagtgaagtttaacatttactcttttttaacataattcttaacttctaaagcaatgctatttattttgtttaataaacattttcacacatgccatatatatatgttccatacatatacacgtaccatgttccagacactattttaaacccttcacaaatattaactcatttaatcctcacaatgaccctatgaaataggtaaactatatgacaccattttacaggtggggaaactgaggcccagagaagctacctgcccaaagttaagagctgggattccagtccactagtctgtgctgctctaattgatttcttcatcaattttctcactatctcaggtgcccctgttcgctattaagcgaacttcctcttgagtttcaatgctaccatgttgtgaaatgcaaactcttaaacaaacagccctgccattcaggagggtgacccacaagctctcaccctttcagcagtcatcatcccttccatgttctttagcagtagaatcagactgtcaaaattagctccttagaaaccagaatatacctatattgaaagagctaacttctggatctgttttaatggaaactcttgtacagataccatgcccttcagttgttttctttagggtcaatctagacctacttgtaaaaataaggttctggagccagatgcagtgactcatgcctgtaattccagcactttgggaagccgaggcgggtggatcacctgaggtcaggagttcaagaccagcctggccaacatagcgaaaccccatctctactaaaaatacaaaattagccgggcatggtggcatatgcctgtaatcccagctactccggaggctcaggcaggagaatcacttgaacctgggaggcagaggatgtagtgagccgagatggtgccatcgcactccagcctgagcaacaagagcgaaactccatctcaaaaaaataataataataaggttctggcacatcccccaaaggcctgcgacagagggacatttctggaaggaaaattcccttgtatttcaaaagcggctctgaccccatcctcctgcctcatcccaccctcaattgtatttcatgatctaagaggtgaaattaagaacagactccctgacttgtagaatcaaagatgtttgcccccacacataatgcaaacccaagattaaagaaagtaaaaaccgtttaagaccaaaaaggcaattatccaaccaatctcgtttaatgagagaatttacaaattctaggttcttccttctagggttctaaagattagccaccaattgctcagggccagcaaagcagctgccacaaatgttaagttcctagctggaaagttaaaaaaatcatattgatttttgaactttgggaggccaaaatgggcagatcacctggggtcaggagtttgagaccagcctgaccaagatggtaaaaccccatctctactaaaaatacaaaaaaaaaaaaaaaatagccaggtgtggtggcaggcaccacacctgtaaacccagctactcagcaggctgaggcacgagaatcgcttaaacctgggaggtggagattgcagtgagccaagattgcaccgctgttctccagcctgggtgacaaagtgagacgcttatctcaaaaaaaaaatattgatctgagttttgatacaaccacagtcctccaaacctccagcgttctgaactgcagagtgcacgcctggaggtctggagtgtggtccctgctgatgcagctgcgctgccctctctctgcaagaaaaaggcctcctgcagcccgcagctgggtggaaccacgggacaaagcagactttgttccagcggaaagccgatgttaggagttgggagagatggaaagcaagatagagtcactttatttcttgcttccaactctcattatgtctattacacaggcacacgacagctgccagacccagaagtaggcagacgggccttgcctggttcggtgactcttttgccaaaggacattgtggatttgactacacttttgcagaaacccaagtttggccctggaccaaaaaccagtcctaccctttgttatccaccttttacctttcttcgctatcgacccacaggccccaactccaaaatcatgacccaccctccccacgcagccctcatgtgcctggagggccccttcttcttttgtctctctaggaaaatctcaccatcttctaggttgagttagatactctatcctccatcctattgcacagaaatcctcaaagtgtggtccctggaccagtggcatcaatatcaaaatctgtgcactgtgccccagatctactgaaacagaagcttggggtgaaccagcaacctgtgctttcacaagccctccgggggtgttgatgcccactcaagctttgcccacttcaacagccataatcactactttacctcctccctacttagcttaggactctgtcattgtaagtccctcagagtctggcacaagctaggcaccctataaacacccaattgttgaattaagctaaataacctcttctaaaacttgaaagggcagtgtgaaatcgacaactttacaggctgctgaacctccaccaccatcttcagacatgcagcgccagcaacacccaggaatcctgcagaataaaatcctgcagaataaagccagactcggtcagaatttccatggagcaagtgatttgggaaaaattaatatgtggctcctgttcatgaccattgtctgcagtaagattctaaaacacaccagggactggacacatggctcacacctgtaatcccagaactttgagaggccaaggcaggcggatcacctgaggtcaggagttcgagaccagcctgggcaacatggcaaaaccccatctgtactaaaaatagaaaaattagctgggtgtggtggtgtgcacctgtaatcccagctactcaggaggctgaggtaggagaatcacttgaacccaggaggcggaggttgcagtgagccaagaaggcgtcaccacactccggcatgggagatacagcgagactccatctcaaaaaaaaaaaaaaaaaataggggctgggcacagtggctcacacctgtaatcccagcactctgagaggccaaggcaggcagatcacctgaggccaggagttaaagaccagcctggccaacatggtgaaaccccatctctactaaaaatacaaaaattagccgggagtggtggcatgtgcctgtaatcccagctactagtgaggctgaggcaggagaattgtttgaacccaggaggtggaggttgcactgagctgagatctcgccactgcactccagtctgggtgacaaagagagactctgtctcaaaacaataaataaaattaaaaaataaaacacactagggcaatgttgggaatgacactggtttatgtctcaaaaggagtcttcactggctccatcaggacagcagagttgaaccactccctaaggaagagaattctctaagagaaattaacccacagtatttggtataacgtcctcttgcctcattagagccactgattccaagcttccaccctgcaaaactcaacacactattggtgctcacacaactggacttaccctaaaaaaaaaaaaaagaaggagaagaaaagatagataaaaatcagaataaaattgaataacagggcagcacagcacaaaatccttagaaatataatgaattcaggctgggctcggtggctcacacctgtaatcccaacactttgggaggccgaggcagatcacgaggtcaggagttgaagaccagcctgaccaatatggtgaaaccccatctctactaaaaatacaaaaattagctgggcgtggtggcgggcgcctgtagtccacctacttgggaggctgaggcaggagaatcacttgaacacaggaggtggaagttgcagtgagccaagatcacgccggtgcactccagccttggcgacagagcaagactctgtctcaaaaaaaaaaaaaaaaaagaaaagaaaagaaaagaatacaatgaattcacatgttctaggcttctctctttgccaagcactatgtcagggtcttcaaggctcacagtgcagcggttaaggctacaactctaaaggcagaccacacaagtgttccctgctccatcacacgatctcaggagatctgtgtaaagagctttaaaacagactgagggtcatggctcgtgcctgtaatcccagcactttaggaggccagaacaggagaatcacttgaggccaggagttcaagacagcctgagcaacatgacgaaaccccgtctctgtaaataaataaattgttaaaactttaaaacggtcctataatataaaaatattaatggatgatactattactatgattactcattgtggaagactaaaactgtccccaaagttatccccaggccctaaagagggaggcagagggagagtccacgtagatctaagagaagaaaacacacgcagaagaggaaaaagctatgtgaccacagcggcagagatggagcaatacagtcacaggccaaggaatgccggtaccatggtagaatatgaaacacccaaatatgccactttggcttaaggaaagttttgaattaaagacacttaaacaacagatgcaagaagggcactctgacctcctttttcttcctgcaagccagaaataaaaccatgcaaaagatgtccttcttgtaccaggaggaaggaaactttcttatcaacagagatggcgagtcgaggccaagagaaatctgtacaaacaaaccttgttaaactaacccttatcttcctagtcactcctccatgatcaacttccttagcccaaacccctctgcctagccacgtttccacagtttaatgcacttggttcaaacaagtatatgagctctcagccctcaccgccccttcgagtcttcatttttctcatgaacttgtaaaaataactcaataaaatatgcatgcttttctcccgttaatctgtcttttgctagtctaacatataaggcctcagccagaaatcctaagatgggtagaggaaaaagatctccctctctcataccagaagctggagaggcaagggttctcccctggtgccttgggtatgagcatagccctgccaattacagttggggccagtggaactcatttgggacttctggtctcagaacttaaaaagaataaatgagtggggtttttttgtgggttttttggggtttttttttgaaatgaagtttcactcttgttgcccaggctgcagtgcaatggcatgatctcgactcaccacaacctccacctcccgggttcaagtgattctcctgcctcagcctcccaagtagctgagattacaggcatgcgccaccacgcccagctaactttgtatttttagtagacacgggatttctccatgttggtcaggctggtctcaaactcccgacctgaggtgatccacccgcctcagcctcccaaagtgctgggattacaggtgttggccactgcgcccggccctaaatgagtgttttttaagctactgaatttgtggcttaggaaatgaaataccatcatcagtcacttcatctttttcaacaataatgcaggcgagccagtatcacccccactgtaagcacaggaatgcttacactgggaaggtggggtggcagctcacatcatggagataggacaaagccaggtgcaagtaatagcaatctgatcttcccagcatgcctggccggctccagtgaatccacatgttgctttctggcctttagggatagcctggaaaacaatcaccctggtaacattgtttttacagaaaatgtagtctggatttcaaataaaagacaaatggctcacgcctgtaatcccaacactttgggaggacaaggcaagaggatcacttgaggtcaggagttcgagaccagcctggccaacatggtgaaaccccgccttggccgggcgcagtggctcacctgtaatcccagcactttgggaggctgaggcgggcagatcacctgaggtcaggagttcgagaccagcctcaacatggagaaaccccgtctctactaaaaatacaaaattagccaggcgtagtggtacatgcctgtaatctcagctactcaggaggctgaggcaggagaattgcttgaacctgggaggcggaggttgcggtgagccgagatcgcgccactgcactccagcctgggcaacaagagtgaaactctgtctcaaaaaaaaaaaaaaaaaaaaaaagaaacctcgcctctactaaaaatacaaaatattagccaggcgttgtggcccatgtttgtcatcccagctactcaggaggttgaggcatgagaattgattgaacctgggaagcagaggttgcagtgagctgagatcgcactactgcactccagcctgagccacagagcgagattctgtctcaaaaaaaaaaaaaaaaaaaaaaattaaacagaattaccacatgatccaacaaatccacttcagagtaaacacccaaaagaaagcaagaaattgaacagatatttgtacacccgttaacaacagccaaaagatagaagtaacccaagcgtgctttgacgcatgaacagataagcaaaaggtggcatatccatacaatggaatactattcagccttaaaagggaaggaaattctggcacgcactgcaacacagaaccctaaaaacatcatgctaagagaaataagccaaaaaagacaaatactgttaagattccacttacatgaggtccctagagcagtcgaatacatagagatagaaagtagaatggcggtgccagggcctggagggagggtggaaatgggagttattgttgaatgggtacggagtttcggagtttccatttgggaagatgaaaagttctggagatggctgctggtgaggcaacgttacattgtaaatgtacttaaagccactgaacttgacactttaaaatggttaaaatgggccgggcgcggtggccacgccttgaatcccagcactctgggaggctgaggcacgcggagcacctgaggtcgggagttcgagaccagcctgaccaacatggaaaaaccctatctctactaacaatacaaaaattagctgggtgtggtggcgcatgcctataatccaagctactcgggaggctgggacaggagaatcgcttgaacctgggaggcggaggttgtggcgagctgagatcgcgccattgcactccagcctgggcaacaagagctaaactctgtctcaaaaaaaaaaaaaaagaaatggttacaatgacaaacgatgttatacatattttactgtaataaaaaaaagaagtactagcaataactgtttaagaataataggtttttgagtgcggttttactttttcctttgagtcctaaattttcattcatgaaatttctcttaaaaagagaaaaggcatttgtggtataaacagcaaaaggaaagaaatgtgctgtcctaaggcaggccaactcattgaggacccacagcttcagggattaatgggattcctgtggcaatgaccttccccacttctgtaatatgaatgatcgcaaagcgaaaatccaattccctctctgtgtttatgaaagccattcctttaggacagctgaagcaacaaagccagtcaaaagcacttcccagccgtgcgattggagatttatattgcacatcaacataaagaaacattatgtaacttaagctgtgggccaggaggcgtgggtcagaagctgaattcaagacatgcttcgccctccaattcccaccactggaccaattaaaaactccccaggcttctgctgccttttccgtaaggtgaaagaacacctgcttcataaggtaaccgtaaatcctgcaaagaacccatgcctggcaaatgtcaggggtttagacacagcatgtgtgaaagaacacagcctgccacagagcaggtgcttaataaatgcccaaggcttgcttcctttcactccatccatgcaggcactcaaagctttatgcttgcttgttcctcaacttctgaagaaggaatagattgccagatttactcttaattgcctcaactccgccaccttctctaaaaagaaaccctcatcctaaaactcttaatgaggtcggctttctattttatggccagataactggaaatgaccggagagctggcaaaatgacaagctggaaggcttcatttaaattagaaaaaggtttctagagtttctcttcaagattatattctagagatccagaaaacctaaggttccagcagtcattagctgcatgaccctgggcaaagtacttatccttagagcactgatattcacatcacaaatgatgtaaaccagatatacacaattgagtctcttaaaaagttaaaagagtgcacacctgtaatcccagtgatttggtaggtggaggcgggaggatcacatgaggctaggagttgaagaccagcctgggtaatatagcaataccccatctcaacaaaaaatttaaaaacttagccagtagtggtggtgtgcacctgtagtcccagctattcaggaagctgaggtggaaggattgcttgagcccgggagttcaaggctgtagtgagccatgacttgtaccactgcatgccagcctgggcaacagagcaagaccctgcctcacacacaaacacacacacacacacacacacacacacacacaaagtaaaggacagtaagaactctaataattttttttgtttgttagagtatcactctggcccaggctagaatgcagtggtgcaatcttggctcttaataattcttttttttggagacggagtctctctctgtcgcccaggctggagtgcagttgtgccatctcggctcactgcaagctccgcctcccgggttcaggccattctccagcctcaggctcccaagtagctgggactagaggcgcctgcaaccacgcccggataattttttgtatttttagtagagacagggtttcaccatgttaaccaggatggtctcaatctcctgaccttgtgatccgcccgcctcggcctcccaaaatgctgggattacaggcgtgagccaccacgcccggccggctcttaataattcttaattattcttaataatttttaattattaagaaattattgctgggcccggtggctcatgcctgtaattccaacactttgggaggccaaggtgggcggatcacctgaggtcaaaagttcgagaccagtctgaccaacatagagaaaccccgactctactaaaaatacaaaaaaactcagccaggcatggtggcgcatgcctgtaatcccagctactcagtaggctgaggcaggagaatcgcttgaacccgggaggcagaggttgcggtgagccgagatcgcaccattgcactccagcctgggcaagaagagtgaaactccatcccaaaaaaaaaaacaaaaacaaaaacaaaaaataataataattaatcatgtccccaccatgaaactattaaacataattgtttatcgtcagggagcccttgttcctgggctgggcctcaggcttcccatcagtagtaaatgggccaaaccaccagttctctcaaaggaggcttctaacacgaatgttccacaacacttgtaaggcccatctgtccaaccgaagcagtcctttataaagttctatccaaatgggatcactggctataacatatcaagaattggaaatagtgatgaccaggaagtttcttttgatttgaccaattaaaacaacatttttttctcatatctaacacttattctcatatctaacactaccccgtatttcaatgtcataggtttttaagctacaaccacaaattctgtcgtttaaatttaggagcaatcacaataattcaccgaccagctataaaataaatttttagcacattctcaatcattctcaataaactgtcatcattcacggatttcaacagcacccaatgccatgtttttaagcagcagtaactcctctgcaaagcaatatttctctttgcaacttatcacaccttacaaaagatacctgcaaagagaggtaaatcaaacaaaacatgtaagttatgtttattttcccattacaaacggtatcaaagtacagagctacagcatcgagacataaaaaggatgccctgaaattttactgggtgcaattttcactaaatatagcctaatgaactgaatagttcaatgcttttgcagaaaaagtcctaagcagtgcaattaagaaaaatctaaaacaacacaatgattttatataagcagcagaaatcttcttcccaaatgagaacaagtcatatgcaccactcatttaagactcttcaaaatgcagaaagatgtctggattttgaaagtgaggaaggaagactaatagttcagggcagcagcatgaaatagcaaaagctcccagacatcagggatacagcctgaagcctccaggctcaacctagctgtttactaattgtgtgactgtgggcaaatctcttcatctctgaacctcagtttgctcatcaataaagtggagataatagtacgtactcagtggggcaagatggctcacccctgtgatcccagcactttgggaggccaaggcgggcagatcacccgaggtcaggagttcgagaacagcctggccaacaaggtgaaaccccatctctactaaaaatacaaaaattagccaggcatggtggcctgtaatctcagctacccgggaggctaaggcacaagaatcacttgaacccgggaggtggaggttgcagtgagctgagatcgcgccactgcactccagcctgggtgacagagccagattccatctcaaaaaaaaaaaaaaaaatagtatgtactctgcctgctctgcaggcatgataattcccaatgctcactccagcctgggtgacgaagccagaccccaactcaaaaaaaaaaaatagtgtactctgcctgctctgcaggggtgataattaccaatgctcaggtgaaaaaaaagctaagactcaggatacacttccaagactagtgtgtcaggccacttttgcattgctgtaaggaaatacctaaggctgggtaatttatatagaaaagaggtttaattggctcatggttctgcagattgtacaagaagcacggcttctgggaaagcctcagggagcttttactcatggtgcaaggtgaagtgggggtaggagtctcacatggcagaggaggagcaagagagagtagagggaggtgtcacactttacaacagccagatcttgcgagaactggctcactatggcaagaactgcaccaagccaagagggatccgcccccacaacacaaacacctcccaccaggcccctcctccaacaccgggagttaatcttaacaagagatttggaggggacatccaactatattagctagtgaatcccagaacctggactcaaaagtatattctcttgctagatggcaaaaagcatttgctggtgaagggtttgatcctgagagctttgaaatagaaaaatggaaaatctaatgggaaatcaggaggaataatcagagtttactctctctctgccaagcttataagcaaaagagctgaagtgtattgaacactatgcccaagagttttatatccattttatcatgcaatgctcctttagctagataattacagcaaaaacttacatagcatttagtgtgtgccttgtaccattccaaacttctatcatgtgattcatctgctcttcccaacatctcagggaggcagacacatccttgtcttagtacatttgtgctgctacaaaggaatgcctgagactgtgtaattacaaagaaaaggggtctatttggctcatggttctgcagactgtacaagaaaaatggcagcaacatctgcttctggggaggcctcaggaagcttccactcatggtggaaggaaaagggggagcgagcatgtcacgtggcaaggaggaggaaaagagagaggggccagactctttaataatcagatctgaggctgggcgcggtggctcatacctgtaatctcagcactttgggaggccgatcacctgaggtcaagagttcaagaccagcctggccaacatggtgacacctgtctctaataaaaacacaaaaattagccaggcatggtggcgcacacctgtaatctcagctacttcggaggctgaggcaggagaatcacttgaacccaggaggtagaggttgcagtgagctgagattgcgccacgcactccaacctgggcgacagagccagactccgtctcaaaaaaaaaaaaaaaaatcagatctgacgggaactcatagagcgagaactcgctccttgtgagaatggcaccaaggcattcatgagggatccacccccaagacccaaacacctctcactaggccccacctccaacactaggaaacaaatttcagcatgagatttggaggggacaaataccccaactattaggaatcatcattttatagacaaggcacttgaggcacagagccaagtgacttccccaaagtcacactgctagcagggccagaattcaaacccaggcagtctggcaccagagtccatgctattaacccctgtaccagggactcttattatatgaagaaataaaatgagagggtgacacattaattatgtcatccgacgccaggcacgggggctcatgtctgtaaccccagcactttggaaggctgagatgggtggatcatttgaagtcaggagttcgaggccagcctggccaacatggtgaaatcccgcctttactaaaaatacaaaaattagctgggcttggtggcgggcgcctgtagtcccagctactcgagaggctgaggcaggagaatcgcttgaacccgggaggcagaggttgcagtgagccgagatcacgccactgcactcaagcctgggtggcagagcaagactccatctcaaaaaaaaaaaaaaaaaaaaattatctcatccaagtgagcacaacttgctttgaacctggtctgcagttctccctgtctgggcactcaccaccatgctgtgtgttcaggcctggcaggcaggggtgccacccccatagcagcactgagccctggggcagatgagtaagcaaacaggatgagatctgggtcttcacagcaggagactgaagagggaaggataagaaacaagtgaccagggaagatggaaggcagcgggaagcaagcagcaaaactaaaagaggtcaaaggctccactgactgtttctgctgactttgatgagtgcatgcacggcggaaacttctggaaacttctggtttccgtaactattttatctatgctcaggggctccatgagctgagttcatttagcaaattaatgaccttctaagccttttaagtcattctgaacagaaaaagaattgctcagcaaatcacttggagaggaaatctcatgaggaaactccctttttttctaagacgatatgacaatgctttcccacgacaatgcagaccctgcatggccacaggtgggaatcgtgatagtaagcctggggtcacatatctcatcatgtactttaccttcatcatatatctatgggaatctcaaaagctgtattctctttttttgttgtttgtttgtttgtttgtgacagagtctccctatgtcacccaggctggagtagaggggcatgatctcagctcactaaaacctccgcctcccaggttcgtgcgattttcctgcctcaacctcccaagtagctgggactacaggcacgcaccaccatgccaagctcattttggtatttttagtagagacggggttttgccatgttgaccaggctggtctcgaactcctgacctcaggtgatccacctgcctcagcctcccaaagtgctgggattacaggcgtgagccaccacgcctggccaaaagctgtatactctttcctgatcttccatcaagcttccaaagacttccaaagatatccgggccacacactgtggaacagacaccggagaaactgggctccaacacagagactagatttaactcctgcttggcaacagctggagcctagaagctctgcacaccaatacagagcctgcaaaactctccatgcctcctgcctctgttaacccagcttcctccccctgtcttaagctgaaactcctccgtgggacttactcatgctgacacacaagcattttctaaatagaaaattttggtagagaatgagtagggtaaactcaggttatcagaatcttagaggaggcccagagacacaaaaagaccacatttaggtgcctctcaactttgcaggaaagttctaaaaatagagggcctgatttcaagtggaagtgattttaaactacaatctattatttaaatagcaaacacgttgagtatctaaaagatcaagacaaagatgagtgagacattcgaagagcatggggacctagcacacatttttgccagctctccatctgccctgatggattactaaattcacagctgactctccagttttaaccattttcttctgattgggtgttaagacattcccagagggaagggatggagctaaaatcacccatctatcagccacctgccccaccccattccaccctgtcacttatcacaaaatcctaaaatacagatatgatcttaaaggccaccagtcccaacccaatgcttagaatctcctcagtgtgtcccagtctccactcacctgggccacttgtggtcaacagtctctcaatgttgatcacattgagtcccctgatcaagcccatcactacccttcagaaacagatttgctcccaaggaaatgtcttgcttctccctacacaaacaggaacagagtgggagcaccatgtgtgttaattccaacaggatgctagactgttgttgatacaagtgttacagtgttaatatagctgagatgggaagccctaaactagtgattctaggctttccagcgtacaagattgatgagacttcagtgtttaaacaacattcactgacagagagaaagagataactagggagattaagggagcagggaggggggatgccgatcaatgaaaatatttcttccagggaagaggcagcactatcaatgcactaagtatgtgacctctatttaaaatacttcccaaagccaggcacagtggctcatccctatactcccagcactttgggaggccaaggcaggaagattgcttgaggccaggagtccaagaccagcctgagcaacataccaagaccctgtctctacaaaaaatttgaaaattagctgggcatagtggtgcatctagctactcagtcctagctactcaggaggcggaggcaggaagctccctgagcacaagagatggaggctgcagtgagctaggatcgcgcctccatactccagcctgggcaacagaaataaaaattaaaataaataggcaggtcacggtggctcacacctgtaatcccagcactttgggaggccgaggcgggcggatcacatggtcaggagtttgagaccagcctgggcaacatggtgaaaccctgtctctactaaaaaaataaaaaaattagccaggcatggtgtggtgtgcctgtaatcccagctactcgggaggctgaggcaggagaattgcttgaacccgggaggcggaggttgcagtgagtggagattgtaccactgaactccagcctgggcaacagagcaagactctaaataaataaataaataaacaaacaaattaaaaaaaaaaaactctcaagattaaaattcagttctatttatcatatcctttcaggaaactggaagaataggtattatgaaaatgaaatgtctttttattcttttttttttttttgagacagagtctcagtcgcccaggctggagtgcagtggcgcgatctcagctcactacaagctccgcctcccgggttcacgccattctcccacctcagcctcccgagtagccgggactacaggcgcccaccatgcccagctaatttttttgtatttttagtagagacggggtttcaccgtgttagccaggatggtctcgatctcctgacctcctgatctgcccacctcggcctcccaaagtgctgggattacaggtgtgagccaccgcgcccagccgaaatgtctttttattctttcaaacagatacttgagtccaatggggaaaggtggaaaaaaaaagtcacaaaacctgtcctcaaaaagccctccatcctattaggttggggagagaaaattaatgcagataaaacaattagaaaacaataactaatgtaattatgggttgttactactgtaacaattactagtgtaattttgagttccaagcataagatttcagaaacgaggagtatgttcccttcagtagctcttgaataccttgagtaaacagagaaggaagcaggaaaccaaacattctcttctttatctcttcaatgtatcttctttatcagcaaatggatttcctttcagggagtttaagaccttgtgggtcagggctacctgcccagttcaggccagaaggaaacaaaggaaataaattaggtcacccatccagcattgctccttcccaaatacctgctcctcaaatgcagagagcaactgtcattgcaagacagctgtgcagacatgtgtttataaacttaaagtccatgaactccaacctggtatcatctctcctaactccagagaaaattcacctcatgcccccttcctctcgagggaaggtccgcagagacaatgtaagatgttctcaccagggaagattccaccttgcttggcctcctgtcagtttctgtcatctccgcggaagtgtcatggacattacagcattctcttgttgccacctttgctggagccaggacctagcactgcttttgcgacccccctgcaaatgtttatttctactaacacgttggaaggcaagaagacaacctggcattcacacaaccatatgaggaaactcaaggaggaacttaactcctttcttagagcctgatgtcaccactattctcccagttccaggctaccgtcaatgccatctcccagggcaacctcatctgggaaggtctcctctgaattcatactgaaaaggttttgaagatgacctccacatatttcaagaatagctatcatcgatctacctgaaagtttgctgccaagcaaagttatctctacacaacatttctttaaccctctcaccaccactttttagacaaggcaattgaggctgagacattcagcaacttggccaagaggcctgaacactgtccagaggcctgaacagtgatggaattccaaaaatcccaaaatccccaaatgcctgctcttcaccgtcaatgctattctgtctcccttcacaacagtgtagcttttcagtctggcaaatggaaaccagctcaacgtactaaagcatatttgtgtggctatgaaactcctagaggaagcagagccacgaagatgaatggagatctacaaataaaactgtggggcaccccagtgcccgactgtatgagcccccctggtgggcacacacctggacgcctcctggtggaagcaaggcgccttctgatccacactgagccatcagctgtccccaccagctggtcagccgcacttcgcatccccagaaccaacctccaagaccccggacccctggcctggaaatgtaagtgggcaggcaatgtttctggaagacactctcctatctgttcactcgtatacccaagccttataatccccagaatacagtaggattggcttcattcctgagtaataaatttagaggttaaaaaaaaatgattcctagtatcaagaacaagaaacaggactgaacagtcctggctccaagtcaatcacagcgccactgacttacgccccacagagtagcaaccatggctaatttctctccagatggcggcttgtacttttccaagcagaatctcatctccccaagccttgcctcacctttctacagctctttgtgttttcccaacgtcctctctgtgcacagagggctttgcaacacctccaaatttactgccacccacagatttaattagcagactgtttactccccccttctctgattggaatatcttaagtaaaaccaggcctccactgagcccgtgggtactccaccctgggcctctgtccaatcggctccccagtgaaaaacagtgtttgctcagctccaactgtagggttggcccaggtccaaggcaggtctatgctgtgagccagccaccggtgccacacaagggccgcaacccctgggggctgcctagtgagaggagactgtatggaaggaagggcagaggtgaccaaataaaaagaaacaaaacgacaccctggtaagcaaggcattagtagtaaaagttagggtacagagacaaactggctaaacacatatttctcttgacttctccatgtgatcgctatagtgaaagaaaaaagaagaggaagaaacagtagcatacattatagaagggaatgagatggtgaaagaaatggaaaaaggaggatcaaagaggacccagagaagaaaggagggcaggagagaagggaagggaataatctgcttttttttactcaccattaagtaaactaattaaaaaccactaaactgaatatccattttacattcaactatacaggagttaaaaaaaaaaaaaagatgcctccttgggagaaacaaaatcaacagcaagagaaacaaatatgaaaccaacagaaggccaggcacggtggctcatgcttataatcccagcactttgggaggccgaggcaggcagattgctcgagtccaggagtttgagaccagcctgggcaacagaggggaaccccatctctatgaaaaattaaaaaattaaccaggcatggtggcgtgtgcctgcagtcccagctacttagggagctgaggtaggaggattccttgagcctgggagttccaggctgcaatgagccatgattgtgccactgcattccagcctgggtgacagagcaagaccctgtctcaaaaagaaaaaaagaaaccaacagcaagcaatgcaaacaggcctacagttcactctcctacagagccatttaatgatgcaaggactgacatgctatctctggctgtggagtaagagtggaggagattacacagaagcacctccttggtccaactaaaactaggcacagccttggctgcacacaccaaaacagcccagtgctgatggtaattacacacatgaccaaccaacacacaaaatctcttcttgataggctgagcctccccctccgatgctatgctgcttgcttttatgtccttcattaatttttcctaaactattttaaggttttatgactactcttacttctttattcttagacttttaaaggggagtcaagcaattaaatacacagagctattgttactcacaataggcactgatataatgtctacctaatcttttaaatgtgcctacattaattttgctgcagagaaaattcctatctttccaatatgctagtgatgaaaattcatttttggaaaccacttagccttgtactttttaatctccccgcactctagcttcaaacacgctttgtggggtgaaggggcccattaaaattaagaaattcctgaaataagagaaatttccccatcctatccagcatgggcaacgtggccaaatcccatctctacaaaaaattagcccgtgtggtggcgcatgcctgcagtcccagctgctcaggacggggaggtaaaaggatccttgtgtcctgtaggtcgaggccacagtgagttgtggttacaccactacactccagcctgggcaacaaagagaaaaaaataaataaatatacctaccctagcaggttatcccagcaagataggtggacagcctttctctaggccaggggaaaacataattttaaattttcaggccaggcgtatctcaacataatcatgcctgtaatctcagcactctgggaggctgaggtgggcaggtcacttgaggccaagagttcaaggccagcctggccaacatggtgaaaccctgtctctactaaaaccacaaaaattagccaggcatggtggcacgcacctgtaatcccagctactcgggaggctgaggcaggagaatcgcttgaacatgggaggcagaaggtgcagtgagctgagatagtaccactgcactccagcttaggcaacagagtgagactctgtctcaaaaacagtaataataaaataaattttctagtagccacatgtttttaaaagttaaaaggttaaacagaatttcataacctattttattcaaccaggtatatcacggatactatcatttcaacatataatcaacacaaaaaattattcacgtggctgggtgtagtggctcacacctgtcatcccagcacttaggaaggccaacccaggaggctcacttgaggtcgggagttcaagacaagcccacttacaaaaattatttttaattagccaggggtggtggtacacacctgtagtctcagctaccagggaggctgaggtggcaggatcacttaagcccagaagtttgaggctgcacgagctgtgttcatgccactgctctccggcctgggtgacagagcaagaccctgtctctaaaaaaataaaataaaaaattattactgagatagcaaacattcttctccttcttcctgtgtctttgaaatctggtttgtagtttatgctgacagtacttcccaattcagactagccacatgtcaacatagtgggcagtacagctacagaccctctgatggaaatgtgcggacaggagggaatagggttagataaagaagtacctaagcacgagggattcgggatctcttaagtgctcaattacaggatgtgcttagctttcctttcacacagcccctccaaaggacacacatgccctgtggtctttcggaaatacccgcctggcatccagagaatctctctagggctctgagttgcagttccaaaacctcacccactccatataatggaaaacacaatgaagagaaagcgagtacctccaaggtacaaaaaccacgctaggcgctgacactaagcatattcaaactcaccattaacatctaagcctaacatgctggccaggagacattgtcttctatggatctccatgccttattaaaaagtcattaaatccagtgcctacatcgagaacaaccagacttaacaacaggaaactgagctccctggcctaatggcctgtcttgttctaagttccaggacaaaccaaagaagcacttaagaatccaaaatcaactgggttcatgcctgtaatcccagcactttgggaggccgaggtgggtggatcacccaaggtcaggagttcaagaccagcctggccaacatagtgaaacccatctcttttaaaaatacaaaaattagctgggcatggtggtgtgtatctgtaatcccagctactcgggaagctgagatagaagaattgttgaacccgggaggcagaggttgcagtgagtcgagatcacgccattgtactccagcctgggcaacagagcaagactctctctcaaaaacagaatccaaaatcagcacttaagaatcttaatttctacctgcctggtcaaaaccactgcccatcactgaatcttgactgcccccaaaatcctaaaagagtaatcattgtgagcatttgacatattttctcagtatctttgttgtcataaaattaatccagggccaggcatggtgcaaacactttgggagaccaagctgggaggattactgagcccaggagttcgagaacagcttgggcaacatgacgaaaccccatctctacaaaaaattaggcaggtgtggtggcaccagccctggctacttgggaagctgaggtgagaggatcacctgaacccaggaggtcaaagctgcagtgagccatgactgtgccactgcactccagcctgggtgacagaggaagaccctgtctcaaaaaaaaaaaggctgagcgcagtggctcacgcctgtaatcccagcactttgggaggccaaggcaggcgaatcacaaggtcaggagttcgagaccagcctggccaatatggtgaaaccctgtctctactaaaaatacaaaaattagctgggcatggtggcaggcgcctgtagtcccagctgctcaggaggctgaggcagaagaatcgcttgaccttgggaggaggagattgcagtgagccaggattgtgccactgcactccagcctgggcgacagaggaaggctccatctcaaaaaaaaaaaaaaaaaaaaaaaaaaaaaagtttatccagaaagttcttgttccaattttttctcttatcactttaaaactaaagcacatgcaaatgggctctgattccttaaattaattgaaaaacatggaccccaacctttacagagcttcatgcacaagcttatcaatgagtatggcctgcccatctaaagattttctaagaggctgcccacgtaaaggggatgtcagagctcctggagctttgggacagccacaagccctctacctggttctctatctaggtcttttcctccttcccattgccccagtctctcccagagctcagacacactctataccttcccatgggaacaaaaaagcccccaggtgagtgttttttggctgatgtgtgagtttgacatccagcactggcacatccaccgtgtgacacttgggacatcactcaactcatcacttgctcttttcccaagcaagtaccaaactgaaggcccatcaggtgccagcagccatgccagggacagggatgacaaaacaccagaatgagcctgctctcaagaattagaggcacgccaacagatgaatggaagacgatgggttactatgccagcagaaaaggtcctgggaggctttctagaggcgatggtgcctgtgttgggcctttaaaaataagcaagaatggaccagaaggggagaaaatgcggcacaggcagagaggccgggggttgatgcttcctgggcccacaccaggcaccaggcctgttcaaagcatctacaggaatcggctcattcactcctcacaaccatccctatgaaataggttctattattttccccatgtgatagacgaggaaactgaggcataaggcaaattgcatcgtccgaggtcattctattcataagtggctaagcaatgcagtctggctcagattgggggtttcccctatggtctgtgagatgactgcccttacccactgcacaccatggcacctgcccatgcaagcgcatgctgtgcttgtgaactgcaagcaaatggtgcaatctggaccaccccggataccccaaaggtcacctaaatgcaggaagctgaaggaagggagtcttcaggacagccgggacccactagagattcaaactctcacccgatactcttcaatccaaacatattaggttggttaaaagtaatggcaaacatcacaattacttttgcaccaacctaaaaacctatagtcaccccacaggtatctgctgacgtgtgtcccccagcagagctgagtgggcagggctggggtgagcaaggagtgaggagaaacgggtggaacagggcatgggcacgagccctatggcctcagacctcatctcaagccacggggaagatgatgaattctaaaccccaacactcagacacatactagggagacagctgacctcccatggaagtcacattgaaaggttaggacaagatggcagggaccaggaggccatgttcaggagagagggcaagaagagggcattagcttcctaggcctgccatgacagagacgttgattgtcacagttctggacactagaagtccaaaatccaaagtgttggcaggactgcactccctcaagagactctggggaaggatccttccttgcctcttccaacttctggtagctccgggcggcttcttggcttgtggctgcattgctgcaattctgcctctgtcttcgtgtggcattctctgtgtgcccacacctctgtatctgaaccattggatctggggtccactataatccagtaggaccccttcttatctgatgacaactgcaaagaccctatgtccaaaggcggccacattctgaagttccagtgacatgagtgtttggagggatagtattcaactcacccgcatagggctgaacataggtcaagggtcttgggactgaagaggagcaagcaaaggaaaaaaatatagcaaggtgtatgacagtaaagaagatgtgctatctttttggttgggggggatgcaaaaattagcacgcctgtgcttatataaaccaatactgcaagaaatcgcaaaaaaaaaaaaaaaaagtattaatagggccgagagcagtggctcatgcctgttatcccagcactttgggaggctaaggtgggtggatcgctcgaggccaggagttcaagaccagcctggacaacatgatgaaaccctgtctctactaaaaatacaaaaattgcccaggcatggtggtggatgcgtgtattcccagctacttgaaaggctgagacacaagaattgctcgaacctggaaggcggaggttgccatgatccaagatcgcaccactgcactccagcctgggcaacagagcaagtctatctccaaaagaaaaaaaaaaagagagaaaagtattaatatttacccaagaggatagaaaactagggtattaagggatggggtgagcacaagactgctctatgtgtacttcattataatctttttaatcttgaaaccatgtaaaggcattatttatccaaacaaagaaaacttaaaaacaatgttttggaagtgaaaattacaaatggatgaatctcacaaacataacagtgaacgaaagacaccaaatacaatcaagtacatcctgtgcgattccttactatcaagtacaaaaatacatctatggggttagaaatcaggattggggttgccctgaagggggcgcaacaggaaagtttctggggtctcagcatgttctgtttctagatctatgtgctggttacatggttttatcccatttgtaagaattcatcaagctgtacaaatacaataacgtacacttttctgtatgtatgttatatttaatttcaataattttttaattaaatacatatgtggccaggtgcggttactcacgcctataatcccagtactttgggaggttgagacagaaggaatgcatgaggccagaagtttgagaccagcctgggcaacacagtgagaccctgtctctataaaaaattttttaaatagccgggtgtcatggcatgcgcctgtagtctcagctactcaggaggctgagatgggagaagaccgtatctctatataaattaaaaagtatttttaaaataagtaaatatatacataatgttagtgcatagcttcctatctgtaaaatggggatgatatcaccccgtttacagcaaagctctcctgcctgaggacgcccagaattccaaggaagaacacagaatgctgtcatcattcaagcccaatgtcatgcacgtccatgtcacatgctctaaaagatttttccaaaagaaatatggacatgacaatgttttcattaatgctgccttggtttcgaaagagatttggccccttattgtcaaagcctgaaattttagctgcaaagcaagcggggaggggtccctgaaaacgtttttatgcatttctcgctgaaacaaaagaccaaaaatggactttccccaagaagtggtgggaggaggggcagcctgcacgcatcgtccctgcacggccgctcattccagccacctaccatgcctcccgtaatggaaacaccacatttaaacaggtgccgtaacagtaaaggggccccataaatgggaaacccaggaggcctctcagagctggacagctggtgcgaaagggagggttacagacctaagtggtccccagacttccggagtctgctatccttcacctcacacactcttaaacatccatttgcctccaagagcacacacacaccacatacattaaatctctcaacaggaaatttcttccattcttaaatggtctcgactaaataaaatacctttgacagagtattctgaggcactggattgtattaaatgacaggggaagagagggaatgggttactctttttttttttttgagacagagtcccgctctgtggcccaggctggagtgcagtggcacgatctcggctcactgcaagctccacctcccgggttcacgccattctcctgcctcagcctcccgagtagctgggactacaggcgcccaccaccacacccggctaattttttgtatttttagtagagacggggtttcaccgtgttagccaggatggtcttgatctcctgacctcgtgatccgcccgtctcagccgcccaaagtgctgggattacaggcgtgagccaccgcgcccggccggaatgggctagttattctgtactaaaccttctgctcagtttagcagagtcacatggacactccggactgcttcacagagggacacgaaatgagaagggggagggcaatgtggtggccctggcagacgcagaattcaggggagggtgagaatcagtgaatcccagccacataagcacccaagtgctgctagcagttgatgagagtggatttcatcgcacccaggttgtgtggcctgtcacggatctaatctctttgcttctccaatttttcatctgtaaaatgggatggcagtactcaccttttgaggacttcttaatgataacatgtaaagtatcaaaaaggcccagtgcaagctgtggtacgcacctgtaatatcagctacttgggaggctgaggcacaaggatcacttgagcccaggagttcaagaccagcctaggcaacatagtgaaacctcgtctcaaaaaaacataaaaaaaaaagaaaaaaaaaattaaggcctagcacaagggaaaggatcaataaaaggtaggaagtacaggccgggcgcagtggctcacgcctataatcccagcactttgggaggccaaggcaggtggattactggaggtcgggagttcaagtctaccttggccaacgtggtgaaacctcatctttactaaaaatacaaaattagctgggtgtcgtggcatgcgcctgtaatcccagctacttgggaggctgaggcaggagaatcacttgaacccaggagaaggaggttgcagtgagccaagatcacgccattgcactccagcctaggcaaaaagagcaatactccatctcaaaaaaaaaaaaaaaaaggtagcgagtacaatggttatagtcctaaacaccacttataaaagtattcaagtggccggaagaggtggctcacgcctataatcccggcactttgggaagctgaggcaggaggatcgcttaagcctgggagtttgtgaccagcttgggcaacatacggggacccccatctctgcagatgaggctctcttatgtccagcctgctcacttcttaaacttctggttcataaaatcaaagactcaagacactggaagctagaaaggacctcagaaacaacatctcacagatgaggaatccaaagacagttgttcatagttttcttttgtttgttttttttgctctgaggcgtaagaaagatttaagtgataagataatgatagtgttttgtaaacacttaaaacaatgtttaaagtaataaacacgaaaagtaaagtctacctgaaaagtaaagaaatggagaaagagagagagccggagatattgttcaattaacagcaacaaaataaagtgaaatgattaagattccgttgctagttaggctgtggtgagtccaatatacttattattgataaattcatatatggatatatacatcaactgatgaagaccaatcaagcttctggaaggcagtttggcaattcaaatcaagagctattttttacagtgtcatatttaatacatattgaatacagaacccacatcctgggaatttatcctgagaaaagtatgtttagaaaagaaagcaagcaaacaatatatacttaaagaatgtcaggctgggcatggtggctcatgccttaatcccatcactttgggaggctgaggcgggcagatcacttgaggctaggagtctgaggctagattgggcaacatggcaaaaccccttctctacaaaaaatacaaaagttagccaggtgtggtggtgcccgcctgtagtcccagctacccggaagactgaggtgggaggatcgcttcagccccagaggttgaggctgcactgagccaagatcatgccactgcactccagcctgggcaacagagtgagaccctgtctcaaaaagaaggaaaaagaaagaaaagaaaaaggtcaaaaaagattattaaaatagtgatgaaaataatactacataaatgttcaattacaggagaatagttaagtaaattatgagctcactgaaatgtatgaccattataaatgagaaatatgaggataaagtggctacaatatgcaggctgatggtgtaacactacctgaaaagaaacaaaatacaaagctgtatctatttaagagttacaattatataaaaagtacatccaaaatatggataagaaaaaacagagaaaaccaaaagcaaccaatgtgttcctatcctaggaatgcagaagaatgtctccttttaaatgcattttattgttcttacaaaaatcatgcagtcaataaaaacacattttaaaagagtaagctgatccatgtgcagcacaaaatccctttcgaagctaagtgcttgcccaactgcctagaaaaataggttgggaaagtcaagcaaaggcctgaatccttatcagatctcaattagcaatttcctcactttccctaaaaccagtgccctcacccctccctctgtggtcattcgaaatgaagactatgccctcaacccttgacccaaccacaggcattcaagccaggctcctcccatgaagatctccttcattcttctgaatgcttagtaatgggtacagcaggccaggtgcggtggctcacgcctgtaatcccagcactttgggaggccgaggcgggaggatgacaaagtcaggagaacgagaccatcctggctaacacggtgaaactccgtctctactaaaaataaaaaaaaaattagccgggcgtggtggtgtgtgcctgtattcccagcttctggggaggctgaggcaggagaatggcgtgaacccaggaggaggagcttacagtgagccgagaccgcgccactgcactccagcctgggggatagagcgagactccgtctcaaaaaaaaagaaaaaaaaaagtaataggtacagcattgtgggatcatctcacctctgaggcaaaatgttttctccttgaggttagggaactcagcttctctctatttctacttgccccccaacccttactactccctcaaggatcatccatgattttctacacataggctcagtatccaggtacaaattcttccgcaaccatttgcaggttaggtcctgggctgctcagtccctgtgacactttttaaaaacccaggtccacggttgggcacagtaatgcctgtaatcccagcactttgggagactgagcagggcagatcacttgaggtcaggggttcaagaccaaggcctggtcaacatggcaaaaccctgtctctactaaaaacacaaaaattagccaggatggtggtgcgcacctgtagtcccagatactcgggaggctgaggtagaagaatcactcaaactcgggaggcggaggttgcagtgagccgagactgcgccacggaactccagcctgggtgacagagcaagactccatctcaaaataaataaaaaataaataaaaataaaaacaggtccagaagggctcaccttggaatcaaaggcatatcggtgcgatgtttttcttggttttctggtttctgtttatctgctggttccaaactgcttgcctaccctgcttccccctcagagtacatgctgcctcatgttgcctcttcctatacatcagtttcaccctggctggaaactgctcatcagcaactaagagaaactttcttctccaatgggcccatagggaagttgccctctctgatctctcctgagtaaaatccccttttcactttgggcttctcgtcccacagccgccaccattccaagctcgcgctcttggcaatgacctgcgcgtcatgcgtgcgtacagactgctgagttacaaatcggggcaagtttatccaaacacaggccaagctcctccacagcagcgccgtgggagatgaatgtggctgagaccttgccatctaagagtttgcggtctggcaagtgtccacagagacccaagctagactataacaacacacagaaaagaaacattgtaacgattcagaagggaagggacgacttcaagtcacggaggaagcagaacatcgaggaaaactgtaagaagatggctgatttcaaccacacctagaagaggaggtagattttgacgtgcagaaatagaaatgtcccagatctggaaacagtgtgagcaaaagaataagaaaacaggatatatccccgaggagaagtaactcctgtttcactggctcaaaggatttgaacaaggagtcctgtcagacaagattgaaaaacaaggtctggaccagtagggctagccatagccaccgaaagtttaaaacacaggtggcgtatcagagctaagctttcagaaaatcaagcttcttagcactgaggacatatccatattacacgtccttaaccaatttaaataggcagtctaagacccagcacagtggctcacgcctgtaattccaggactttgggaggccaaggtgggcagatcgttcaagtcaggagttcaagaccaacctggcgaacacagcgaaaacccatctgtattaaaaatataaaaattagctgggcatggtggcaagtgcctgtaatcccagctactcaggaggctgagacaggagaatcgcttgaacctgggaggcggaggttgcagtgccaagatcatatcactgcactccagccaggggggcagagggagatggtctcaaaaaataaataataaataaataaataaaaataggccacttgtggtggctcacgcctgtaatcccagcactttgggaggcccaggtaggcagattacatgaggtcaggatgaaaagcccatttctttctcaaaagggccacgatccctcttgctgtcccagaccaccagagctaacatttggttccggtgaaatggaaacctcgaaatgacgaaggagttcaagagcagcctggccaacatggtgaaaccccacccctacaaaaatacaaaaattagccaggcacgatggtgggcgcctgtaatcccagctactcaggaggctgaggcaggagaatcacttgaaccccggtggcaaaggttgcagtcagctgagatcacgccattgcactccagcctgggtaacagagcaagactccgtctcaaaataaataaataaacaagcaaacaaacaggcagtctaacagagcagctgggcatggttatgggttgaactgtagccctcaaaaaaagatatgtcaaaatcctggccaggcacggtggctcacgcctgtaatcccagcactttgggaggccgaggcaggtggatcacaaggtcaggagatcgagaccatcctggctaacatggtgaaaccccatctctactaaaaatacaaaaaattagccaggcgtggcagcatgcgcctgtattcccagcttctggggaggctgaggcaggagaatggcgtgaacccgggaggcggagcttgcagtaagccaagatcacgccactgtactccagcctgggtgacagagtgagactccgtctcaaaaaaaaaagatatgtcaaaaccttaatccctggtacctgtgaatgtgagcttctttggaaacagggtctttgcagatataatcaagttaagaagaggtcatactgaattaggctgggccctacagccaatagctgataaccttataagagaaagggggagatgtggaaacagacacacagacacacatggagaatgcagccatgtgataatgtcagagattggaatgataatgtgacaagccaaggattgcctggagccaccaaaagctggaagaggcaagaaaagaattttccctagggccctcagagggagtgtggccctgttgacaccttgattacagacttctagcctccagttctgtgaaagaataaacttctgttgtcttaagtcaccagattgaggtaccttgttaccgggaggaaactaacaaagacatgaattaaatgtcttggaaatcatcaatgctttgggacattcagagaagatgggatcattcatgaaccaggaggcaatcctagagaaaagctgaagtcatgagacacaaccatgattgggactgtggatataagactagtgtctaaggagaaaggggaaaaaaggggaggcactcaaccctccaaggtcaacaatgttctgatgactgagggtcttggttcaatcccagcctgaaaggatccattaatagcgctaatccttccattgagatttaatcactgggctcctctgtggcccccactggctttctcatctttgttcactctgacagagcccacatattctttattcttcccaaggtccttgttgttaagaggaacactttgtgattaatctccatgtgtaaagtggattacaaaacgagaaaatatgactttggggggcttaagtgtccactagtcacacccattcaaagatgaaggtgtatattcattaatgtgatttttctgattatacaagtaactactactcatcacaaaatctttcaaagttagagaaaatcatacagaagaaaataagttgcttttatacaggaagagaaaaaaattgttttaatttattttaaaaaaaatttttaataaaagaaaataacaaccacccttaatctcaacactaaagaatatttataatgggtattctggcacactttatgtaatgaaaagaggtatttgtaatttaaaaaaaaaaaaaaactgtgatggaatcttccagaagaattacccaggtagaaggaaaaaaaaatgttaaaaagaaaccagaggccaggctcagtggctcacacctgtaatctcagcactttgggaggtccaggcaggcagatcacgaggtcaggagttcgagaccagcctggccaacatggcgaaaccccatgtctactaaaaatacaaaaatgagccaggcatggtggcgcatgcctgtaatcccagctactcaggaggctgaggaaggagaatcgcttgaaaccaggaggtggaggttgcagtgagatgagatcgcaccattgcactccagcctgggtgacagagcaagactccatctcaaaaaaaaaagaaagaaagaaagaaagaaagaaagaaaccagagcatgcctgagaaaaatggagaagggtgggcccatgtaatcaaaggctattaaccattttaacactgctagaggtcagaaatattttattcatggcaaaggaaaaaattcaaggatatgcatgtcacagcatctacagtgggagtaaaaactattaaacctgactctcctctgctccagaattccacgaagtaacttgttgaagcttgaaaaaccttgagttttcaagtttttcccaaattaaagttctctagcaaccataatgcagcaaccaagaccatatcttatacccttgaaacaactttccccaaagccctgttactactgtctcagctgtctcagctgcagggctgtgccccaaaatagtgggggggggctggctcctatgttgtaataaagataaggtccaggcattccagcttactagttgctagttgctaggaggctcataaattcacttttcctgacttggatgagattcagaactgctgtatcacaggctgagaagacatggatcactacaattaaaattcagtctgtccaaaaggaacaattttagcccttcccactctaataagctacattaactggtcctgttttaaagaatgggcagttaactgggatctctaaagtctttgtcatgaagactgcaggttcctcatgctaaccggcaacttttagaaacaaagtatatctggttttgagcccatcttccaagaaagagactgtcatttgtgtattcttacttgaagtccactgaaattgtggcaacagactcccacaaacttttaagataatttgaattgtttgatacaattggtgaggtttcacagggccaaggttgcaggcagatccaaccctcaaaattaaagcaattagctgtccgtcagcagggggaaaaaaggaaaaaaactacagggtgaggattttcaatctacttttaaggaattcgattgctaaattgtttagttaactaagaaccacagttacaaggttttaatttttataattacaatgaaatgttaaagttcaattgatataattgtggcactgaaattgtaacttctaatcacagagatttcaagatgagataattatttgaacattcacacatcttttctaaaatgtcatggtagaccatgcaccacacttggaacgttttctgaaaatattttcaatgctcgataaactgcttaagaggagtaattttgtaataatcacccagcaatatattaaccataacagatttgagggttaaggatgagctttgcatgacacagttattagcaatatccagaagacattaattgaaagaacttgctcaagcacacaaaagcccaaaacacctgaaattattatctagctttaaagaactttctactgtataaaaggaagatacactttcttaatttaattccagctaaaataataaccaaaagctgatgcctcaagatagctcagttccaaatatctagaaagtacaagattctttcctaagacatttcaacatgtgatctcgaatagtatttgttatttgtgtcttttttttttttttttttttttttgctgagagagtcccgctgtgtcacccaggctggagtacagtggcgagatctcagctcactgcaacctccgcctcctgggttcaagcaattctcatgtgcctcagtctcctcagtagctgagattacaggtgtgtgccaccacacccagccaatttttgtatttttagtagggacgggtttcgccatgttggccaggctggtctcgaactcctgacctcaagtgatctgaccacctcagcctctcaaagtgttgggattacaggcgtgacccaccgtgccaggccatctgtgtcttttaaatgtggggtttctcaaccttaaccttttgttgttgtttttttttttttttgagacgagagcctcgttctgtcactcaggctggagtgcaatggcacaatctcagctcactgcaaactctgctcctgggctcaaacaatcctcctgcctcagcctcccaagtagctgggactacaggcatgcaccaccatgcccagctaatttttgtatttttttctagagatgggtcttcaccatgttggccaggctggtctcgaactcctggccacaagcgatccacccacctcagcctccccaagtgccagcattgcaggcatgagccaccgtgccaggccaagctgaacattattgactatggacctgatcactgtcctggtgggctgttctatgcactggaggatgttcagcagcatcattggcctttacccactagatgccactagaacctctctagccatgacaaccaaaaatatctccagacattgccaaatgtttggaggcaaggctgcccccagttgagagcctctgtattaataaaacacaacaaaaactaccacccagcaaaagtttaacacccaaaagctgataccaaaggtagttcacttccaaatctcattgcaaatatttccttcaagaagctctgataaataaaataactgagtgattcagagtttttttaagtaaacaaagttttgctttttttaagtgtgaaattggtgttttaaaacaaaatgtttcctgtgttccttttcttgatctataacttaattagtcatgccagaagtgtagaaaaggaaatgtaaattagcataccacctacatatgtagtgaaaagtattggcagaatcatgactaagtaaacattttttattgactttcagcttttaaaaataaatatgcatagggcatcatcaagaaaattaaatgacaacgcacagaatggagaaaatgtttgcaaatcatatatttgataagggacttataactagaatagataaagaattcttacaacttattaataaaaaaaaattaaaaatgagcaacacgtctgaagatacatttcttcaaagaaaatatacgattagcctacaagcacatgaaacgatgttctgttcaatgacattatttattggagaaatgcatatcaaaaccatgaggagatacagccgctcatccaataggatggctataatcaaaaagacagacaataacaagtgttgacaaagatgtgggaaaattggactctttatgcactgctggtgggatgtaaaatggtgcacccactttgggaaataatctggtagttcctcaatacgttaaacatagaattacgtatgacgtagcaactccattcttaggtttacatccaaaagaatatttttttaaaaggccgggcgtggtggctcacgcctgtaatctcagcactttgggaggccaaggcaggcaggtggcctgaggtcaggagttcgagaccagcctggccaacatggtgaaactctgtctctactaaaaacacaaaaattagccaggcatggtggcatgcatctgtggtctcagctactcaggaggcagaggcaggaaaattgcttgaacctgggaggtggaggctacagtgagccgaaatcgtgcctctgcactccagcctgggcgacagagagagattccgtctcaaaagaaaaaaaaaaagaatttaaaaaaaaaagatattcaaacaaatacttgtgccatattcattcataacagtaactacacacaaaggccaaaaggtggaaataacccaatgtctatcaactgatacatggataaacaaaatgtagtatacccatacaatggaatattattcagccagaaaaaggagtaaaatactgatacacgtcacactacagatgaaccttgaaaacatgatgctaaatgaaagaagccggtcacaaaagaccacatattataggattctatttctcggtaatgtccagactaagcaaatccatggtgacagaaagtagattagtggtagccaagtgctgggaggaagggtagagaaaggaagtgactgtgaatgggtacagggtttcttttggggtgatgaaagtgtcctaaaatcgactgtggtgatggttgtacaactctgtaaatttatcaaaaaccactgaaatgtctactttaaaaagaggtggaagtatatcttaataatactgtcataaaaataaaaacaatctatagagaaaacctagaagacttaatcatgattacagaaatacaatgtaccaacacaacattaccactcctgactgctgacggagctgggggtagagccaggaagaaagttaaggagaaaaagagaagatcaggacatccatttctaatttcacaagggcagggagggattaaaagtcactgtcattggttgatgtaactaaattaaaggtctatgtcagtaatataaagactgaagaataatcaattcaagaaccataaggccaggcgcagtggctcacgcctgtaatcccagcactttgggaggcttggaggagagtggatcatgaggtcaggagttcaagaccagcctggccaagatggtgaaacctagtctctactaaaaatacaaaaaaaattagccaggcacagtggcaggtgcctgtaatcccagccacttgggaggctgaggcaagagaatcgcttgaacctgggaggcagaggttgcagtgagccaagatcatgccactgcactccagcctgggcaacagagtgagactccatctcaaaacaaaaacaaaaacaagaataaaagaaaaaagaaaaagaaccacggctggacgtggtggctcacacctgtaatcccagctacttgggaggttgagacaggagaactgcttgaacctgggaggtggagagattgcaccaagccgcgatcatgccattgcactccagcctggggaacagagcgaggctctgtctcaaaaaagaaaaaaagaaaagaaaaagaaagaaagaaaaagaaccattaaaaaaaatgccatggctcacacctgtaatccagaactttgggaggctgaggcaggaggatcgcttgagtccaggagttcaagaccagcctgagcactatagtagaacccctatctctatagcaaaaaattaaaaaattagccggccatactggcatgcacctgtagtcccagctactccaaaggctgaggcaggaggatcgcttgagcctgggtgcttgaggctgcagtgagccgtgactgcactacagtctaggcagcagagcgagaccctatctcaaagaaaagaaaaaaagaaccataagtataattatcaaaaaatgtggagaatgaaggaagtaggtgagatgcaattgccactcattataacaggaagctgagaattaaatcatatattcatactatttagagatataaagataatcactagaagcactaaaaacaaaaatgaacaaatgtaattgtttccagagaatatcaggctggatgggaataaaacaggaccggggcagaagactgttacaatacttttcaagagaagcgcatctgttctgagtctcttaatgctatatggaatttttactctgcactactttttttttttttttttttttttttttgagacggaggctcactctgtcacccaggctggagtgcagtggcgtgatctcggctcactgcaacctccacctcccaggttcaagcaattctcctgcctcagcctcctgagtagctgggattacaggtgtgcgccaccacacccagctaatttttgtatttttagtagagacagcacccagcctgcacattatttttacaatcaaatcgaactttgcattacttgagtcgaagtatctgcatgaaataaaaatataatttatgtcagaaaaaatattaaactagatcattactactgagtaaaattgtgaattaagtgtgatttaagcaaaaccaactcaagtttgatagacaaaaactgcgtccctactacaaaggtagctgagagatgtaggctggatccttaacaagaaacctccgccaggcgcggtggctcacacctgtaatcccagcactttgggaggccggggcaggcagatcacctgaggtcaggagttcgagaccagcctggtcaacatggtgaaaccctgcctctcctaaaaatacagaaattagccaggcatggtggtaggcgcctgtacagctactagggaggctgaggcacaagaattgcttgaacctgggagatggaggttgcagtgagccgagattgtgccactgcactccagcctgggtgacaagagtaagactctatctccaaaaagaaaaaaagagagagaataagaaacctgttgaaagtccctaccacaccacatgtagggcagacagtaagaatcatcataaaaaggtcaaaactctgccatggcaagaatgagcatccaaataccttaataactctggaatccaaagaaaatttcaggtgaaaggaagtgcacgtggcaccgccttcatctctccaccaacaagcacagccgaccccagttagaacacactttgaaaccaaaaggcagatgctgctaaccactagaacaaagcagaatctgccatcagaacagtactagatagagttatttaaaacatactcagagttacagctgggacacttgggacacaggattctgagagaccaaagtgggtcatttttgagcatgtcaggtggtagaattaataatgacaccaggcaacaggcatgaggaggagtgtcctggggtaccccacggagcttggggccttagcagtgtggagatgcaccctgtggttatcagtacccaggtagcccatattatgctaaagaacttgccctccaaattatcactttccaaagatatcctgtgtcctgtgaggagatggagatgcacattctgcaagaaggaaagaacttacactttactccagttggttgggtgagggtcctgttaagtttcaaacaaaacaaaacccacagaaggtcatggcaagaataaaccccgtggttctgagcctctgaaaacactgcccaaagagtgagtgggaacgagctcatgagaccctcctggactttcctgcaagaaattatcatttgcctggaatgcggccacccagcccaggtgatggccaaaagagggttgggttgatagagatcttgccccaggatctgaagaagccctggaaggtgaggcctggggctgcaatctttcccaacagacaatggaggcctccaacaaggctcagaggagaggttttgcaggtcagaccctcacccctacctcaaggcccctcaacaagcagacgtcactattgtcccgatcccaccttccctcctgagcaagcaatgggtagcaaatcctgttcaccccatttccatggtcctgacatctccccttcccctagcgaagaggattccaagacccactcctcatcgtgacctccccctgcccccagatgacgcggtggctttctggggctcattattacccctgcagagtgggcagaggaaaccaagagcaggaactaggattgatggattgacctatgtttacaaggttagcagctctcaggcaaggtgggagggacagtggaagggaggcaggagaacgctcctttggaaacaggctttgcaaagccaggattttttggcaggatatcctgtcttcctcatggtcacagagaagcgtgttttgggtctttaaggaaaagcaactgaatcctcatagcccaatctccaatcagtttctccacccattccaagcttggacactcagccccactgcctcccaattatatctttttcccagcacaactgcattagagtcctttgctctttaataaaatcatactctagcggggcagaagctggaataaataatacaggtgttattttcttaaaaccaaagacacttccccctccctttcatctttctttcatgaattcaaagtggtcccaaacagaaaacatccatattatacttcagttttgctaggttccaaaaggctaggatgcccccactccaactacacccaagtcttcctttaaggaaagaaatacttggtgacaggaccaagcctcaaagggccctgggcccattctgaaactgagattgtgctcagctgaaagaaacttcctcccacagagttcttcgatgaatcatcactctttgtttaacatcctctgaaagcagacaattgatcggctctcagatcatgcctgcgtagtacccccaccccctccacctctgcaatcctttcagtgagctgagaccccactccagggctccgtggtaggatgcagtctcccagctctgcctcagcccagagggagaagaacctcttcacctagtgaaagagcttcaaggtcttctagaagaatctcacacacgcactggaggaatctctgcggcttcccatgcccacagtctaggcccttatgaatttcttaatgaggtccctggagaccacaggaacagggaaggtcttatgctggagggtgtggaggacggtgccagaggctgggaagggaatggaaggggaaaactccacctaactattaatatcgtgtacccttttacactagaacattgttttattttaaaaaacactctgttccttgctgagtactgctttatttctgaatgtctcttttattatttttttaataaatgatttggcctacaatgatgatgagagagaatttgttctttttttttttttttacacaggagttatagcttatataaaatggagtacttagagatgaaaagacctgaagtttggaattgggaaaaacagaaacgtttactagagccctgctaatctgatttttctggtccagaattgagggaaaaacaaaaggagagttacccttagaaacataccttctacctgtttgcttaatttagaaagaaaatgtacatgtaaatatacatgtgtgtatataacatacacacacacatccccagtgaaagtgtgtttttgatacagaagaccaaatgactggagatcgtaaaacgaggctctttcttaaccacgagcctgagtccgtggtgttcagcactttcatgagaatctgtaacctggcccagaggaacagaattttcttcctggcttctcactcccactcctctgccctcctcaagcagacagaagccccctctcccggcacagatttctaggcaaggctttgatgtggttcccatgctctcacctgccttcctcatttggaaaaaccagaggcttctactgcacatctatgaaagtgttgtctcacaaaacgtgtttctcctttagacagtatgatccttgcagaaatcgcagaagtgttaatacatgcacctagtaggccctcagcaaactctcccaaggaattcctgctcagggctccagggtttcagtcggcacactagaactgcaggaatctggggggaaggagacaggcccaacgctgcttttcctttctggtttagagggggaggggagaagagaggagcaaggagaaagaactgcaaagggaaaggagaggaagtctttgtccgggctctttggacgagcattagagtggagttaaattgtcagctaatgagatttcctaaccacgtgctcccttttaagtctaggcccccaactgatttgatccccacacaacagcaggggggaaagaggccttcagcatccctaagggcgcgagaattcccagaacaagtacaagaaggatgagaatcatttctgagagttcaactttaaataggttatcatatttattaattgacatctagcaacaatgctactggccgcgttccacatcaacagccgaataggggttcacgggagtcagattccactcggggtaactgaggcaggcccaggggaacggaagagacagagcgcaatcctgagggcttctccaaccactggacagcctacaagtcgagtttatgtttgtttgtttgcctgttttggctggcaaaggcccctggggcctacattcaaagaatgtgttgttggacccaataatttattccaacaggcaaaagggtgttaaaacaggaagtttttttttttcaataaaatctttgtcgttaagcctgagatcatctgatctgattatggactgttattattttgtgttgtttatttctatatgaaactgatttctctttttgcctaaagaaaagtagcagtgcagagctagtggaggaaaaacaactcaaaacacattcacaacattttgaagatattcaatgaaattgattctcttctaccttccctgcttagtcaacagcctcttccttaagttttatttctcctctattcaaagataattacttagcaacgtcggtgtttaccacgcaaaggcatccaccctccctagcccagctttttaccttgagatacaaaaaagcatatgctggaaaccaacaatttaccaaacttcttcagctacaaggcatagcttaaatttcatctctcctagaaagtgttccctcctaacctccagacatctctttgttcaaacctccctccttcctggacttaatcactttccacagcagtccttggttcactggcaactgctttccacctggaagggtttttccttctccaaacccaggtctgggtcccagcagaatcttgaagaagaaagaagaaacaactaaaacctaatggaaattcaaacacatttttaaaagggctgcaagcgattagataaatctaattaaacctaaggccaagtaaaacaagtcctgtttgaagctgagaacagcagtccttcatgccttttataataaaaagaaattggggctgggggagtgaagaacgcagaaaaggaaagcgacaaggggccatcctctattacagatttcctctaacacagaatcaacaggactctaatatttcatacgtggctgtcactgtgctttgaggttaatctatatggtcgtttaagccccgcccccctagaggttattccttatccccactttacagatgcgcaaactgagacacaggaagatagaatagctcggccgggatcacccagcttgtgagtgacaccgagcaggtactggaacccgggtttgtttgacctcagcgcacaggctctaaacctctgctccaactcaaagtatgcgccaagtcagcgtgcatgggtaacccgatccggacggctctgactcgggatgcggcacagctgccctgcggggccgcgcgggtgtcaccgaggcgggcacagactgcacagtgtccccaagggctcgcgcacgtccttcaagacctgccagcgcgcgggaaaaggcaggctccgagtcaaccagggctgacccgggggcaagaccaggagacgcgacgactggaaccgggtgagtgtggccgagtcggcgccccgagggccgccagcctggaccccaggctgggacacgggcgcccccgggtgcaggggacctagaggcgccgtgcgcggcgggggctgggcgcgaaggcgccgagacggcatctttcccctgcagcatcccgccccgcggccggggggagggggcgtcacctgacagcgcgcaacaacttctccaggtttcgagggggcaagcggcagccgccggggctggggggcgcacggcgcgctgctctcgcccaatggcgaggtctgtaaacaaaagcgggccccacgcgggtccccagccgggtggcgaggggcgcggcgcagcagcatcgcagcggcagagctggtgagagggcgaggcggggacgggatagggcgcggggacccagggcacagtccccgggacccgaccgcccggatgaggcattgtctgcgcacccgcaggattccgcttttaatgcccccctccgggggttcgtcgcgggtccccagctccgtgcgccggcccccgggctttccgcccggtgagcccggccccgagggcggcacggatcgccaaggtgagcgcccaggacgcgtcgccgaaaagccaggcccggaggtgcctaagtcagggaccgagacgcaaacatagacacaaggatgcacaagcacgccctccccgaagttgacaaaaatcagccgataaaatacaaagtgccgcggccgccgcaggtcagcgctgacctcctgctgccgagaggaccgaatgccgacgtccggacgctgtcatttccatccagcgaaggcacctgggctgcacggtctcgtctccctccttcgcgcgagggatgcctcctcctgcctctcctccccgcatctccccacctcccaagtgtgtgaacacgaaaacaatacgtggaaagcccgatcggggggagctaggacccgccgggagccccagtgtgcgggagacgggggtcagaacgtgcccggcacgggcaccgaggctccgggcatcctcgccgccgtctcccggggcggctccggccggacgcccgcgcaccccaggcccgcggtactcacccgcgacggtcgtccgggatctccgcgacggggccgggcacgatgcggggcagccgtgcccctggggctgcgggcgccaaggcgtccgcggagctgcagagctgcgcgcccgacggcggcggcgctgctctgccggccgcgctcgaacccgctcgtggtctgccaatcggagctgtcagggcccctccgcctgcggcctcgggggccgggccgcgggagcccgtgggaaaccgagctccgattgggccgcctgacaatcgctccgcctccggccagccaatccgaggcggtggatgcaggagcggggcgttcggagttgggctgtagagcgactatgggcgcacgccgggtatccgcgccgcagccaggctcggagcgcgcggctggaggggcgcgggcggcgcgcgctccagagatgccttcctgcgaggctccgtcagcgcggcccggggagatcgcccgcaggcagcggaggcgcggcgggccgggggacgaccagggagcccctaacaaagcagctttgggagggccggaggcctctgcctccctcggcgataggtccgcgaagctgcctgtcatctcgcataggtggaggtggccaatggcgtgcacagacggagctctagttggcgcgcgcgcgcggctcggcatcggtgggattggtcggaggtaaaggattttcctgccacctaaggcggagaggaagggggatcgaaacgggggaggcgaagagtcaaaaaatgttgtgcctgggacaagtggtctggcgcgggaggcgtgtgcctggctctagggggagacaggaacttttttacgagagaaaaaaatcctaacgcaatcccttcccgtggatgctagaggatgttagaccctgagcagcctccaggtagggcatggtggccttcaccagagtccaggactcccagggttcacttaccgtgcccagcaagcgaacttggaataacagcgtggggtttgggccttacgcttacctgctgggcagagtaagtgactcgggcagggttcacgcagacctcctgggctcctctgtaaaatccggaaactacagttgcagtttacctctcgcaaggttgtggagaacgcggaaacggagacgctggcggtacagcctcgagcgaaacctttccctacacgaggccggagcttcctcctctcctgaagagctctagacttccccatttacaacaaaggctgggatgtatgttccttacaccttgattccatacacacgtgttcgccccgggagctgggaaggtctgcgctcccggggtgatcttgttgaaaacaaaaagaattgcccacgctgtggaagataaacctaaaccggaaaattgaaagtcatccctgattcctccttcttcttaaccctctcccatccatttttgttaacctcccaaacccattcctcccatcctgtctcacctggacctcagtaaagggctcccatcgtccttctgtcccaggccttgccccctgaaatctgttctccactttgcagaatgatccttctaagcagaaaaatctcattttgcgctcccaactctgggtctcttttctttccccagaacacgtcaacccccagcccctcccttcacttcactaattcctacccttcttcagatcccagcttggccgccaaggcatccatgcagtaggcattgctgaactactgctcttacagaccccgggaagcctcctgtaccctgtcaaggttagatgccacatttccacttccagtgcttccaccccctgtgctcccctcacaggcctgtatgacacggggctgaagttgcctgttgcactgcagccttccatggaagccggaatcttatctatcttccctgctggatcccagtcctagcacagtgtttggcacatttggggcactgaaaaaacatggaatccatgaattatagaggagctataattataggcaagagctttaaggatttgaagtgcttctaaaacatcagtttgagaagaatgggtagcatggtagctcttgaacggatgcgtccaccaggttccatgatcagtattacagggaggtttttgagtcaagtttgagagattttccaaagacaccccttccaaaaccagcctcgtttcagccaacagcttggaatggagaataattcccttgagaagcttttcatcccaggacaaagagccatttctttacctgttacaagccaccatctaggggaaatacatatatttgaaaatgagtagagggtttttccctaaggaagtttagaagtacatctggccatccttaaaagaacagaccctggagtgaggctgcctaatttcaggcccggttcctttctagctgttacctagggcaagttacttcaggcctccgtgcctcggtttccccatttatataaatgagataacaatagtgcttcataccacatacagttggtacgaggatgaatgagttaatattaacaatgtgctggccaggcgcggtggctcactcctgtaatcctagcactttgggaggccaagatgggcagattgcctgagctcaggagtttgagaccagcctgggcaacacggtgaaaccccgtctctactaaaaatacaaaaaattagccgggcatggcggtgtactcctgtggtcccagctactcaggaggctgagggcaggagaattgcttgaacccagaaggcagtggttgcagtaagccgagattgcgccactgcactccagcctgggcaacagaacgagactccgtctccaaaaaaaaaataaataaaaaacaacaatttaaaaaaaaaatgtgtttagaagagtacctggcacatagtagcatttaataatgtttactgaataaataaacagcttccactggacatgtgtgtgatgggtagggagtcctcatgagtgagtggcgggttactagaggcttccctgaaggtgagtaatgggatctctcttccctgcctcatctgagggctgctgccttagggtctcctgttaaggaggtgacattattgtaaggagaacctcagatgaatcatcacagcagccatctgattgccttgtgcctaagacgtctgaaaagcactttgagatgcagaatcctggcggtaggttggctgggttgaatctcagctctaccacctaccagctctgtagccttgagaaggttacttaatctttcttaagcctcagtttattgatctctgaaataagggtagtaacacctaacccgtaaggatacggagacagttaaaaagaggtcacgcgtagcatatggtacaaactcatcaaagttggtgatcgggttcagctaagttagtgaaaaacaggataataacattccattaaatggttgaaaaacctggatgaggccgggtgtggtggctcacccctgtaatctcagcactttttgaggccaaggcatgtggatcacttgaggccaggagttagagataagcctggccaacatggtgaaatcccttctctactaaaaatacaaaaattagccaggcgtgatggtgcatacctgtaatcccagctactcgggaggctggaggcagcagatgcagtgagccgagatccagccacggcactccaacctgggcaacagagtgagactgtctcaaaaaaaaaaaaaagaaagaaagaaaaacctggatgagacaatgcaggagaaatactcactgcccataggggagatagatacatagggaaccactgtttgggccctttctctcattcactttctccctgaaccccacttacttcaacatgtcagtactttggctctcagaatctgctcacagctgactgtgggaggctttgttcccacaatcatggtgctgggttctgccactgaagttgacagaattaagccaatccagcctttgggtacctttatttttattgtatttatttatttatttatttattttttgagacggagtcttaccctgtcgcccaggctggagtgcaatggcacaatctcagctcaccacaacctccacctcccgagttcaagcaattctcctgcctcagcctcccgagtagctggtattacaggcgcgtgccaccaggcctggctaattttttgtatctttagtagagacggggtttcaccatgttggccaggctggtctcgaactcctgaccttgtgatctgcccaccttggcctcccagagtgctgggattacaggtgtgagccaccgcacctggcctgggtatctttcttgacctcgcaaacctaaaaagctactgcaggcttcagtgctgtttcttgtctccgccctacacggtacatcgctacttcacactggcaaagagaatggggcattttgattaaaatacagacaaatgccatctggccgagtattctgacatcttatctcctgagggcactgttgacatctaaagagaacatggaattggcattaaaggaaaaaatggggtggtcaaaggcagaatcaaggtttagggcaggagaatgagcacaagttacatttctagtacatgaccctagctgcaactaagagtcaacattttcttccccactggttattgaaaggctgactaaacaatcgtagctgagttacaacaaatggtcttccccagtacgaagatacctacacatgcgctctgggcagccctgcctcacttgtgttcctgagctggtctttctctctaacagatgctccctcagggttagactttggcctgtttaattcactgctctattcataaagtgtctcgaacagtgccaagcacatagtatgtgctcaataaatatctattggatgaatgaagtttagccttccgcactctacgaggagtttggcactgaattattttcttttctgtcatctatttgtggatgccctctttaaagaaaggacaggaggcagcttatacaaaaatagatcttgggctaggcgtggtggctcacacctgtaatcccagcactttgggaggccgaggcagatggatcacctgaggtcaggagttcgagaccagcctggccaacaaggcaaaactccatctctactaaaaatacaaaagtcagccaggcgtggtggcaggtgcctgtattcccagcttcttgggggtctgaggcaggagaatcacttgaacctgggaggcggaggttgcagtgagccatgatcacaccactgcactccagcctggcaacaaagcaagactgcatctctatatatatatatttttttatatgcatatatatatttttatatatgcatatatatttttatatatgcatatatatatttttatatatataaatatatatatgcatgccaggcatggtggcttatgcctgtaatcccagcactttgggaggctgaggtgggtggatcacctgaggtcaggagttcaagaccagcctggccaacgtggtgaaaccccatctctcttaaaaatacaaaaaaaaagtagccaggcgtggtggcgggtgcctgtaatcccagctactcggaaggctaaggcaggagaatcgcttgaacccaggaggcggagcttgcagtgagccgagagagcgccactgcactccagtctgggcaatggagtaacataacactgtctcaaaaaaaaaaaaaaaaaaaaatacacaggcagccaaattaaccttccttcggagggtcttgtgatgcctggcaacgtcttttccctgggtaaagaaccttgtcgcgagttcctcagattgttgatgtgctgattaatgcataccccactgacactgaaaagtatgctgacttctttctgagtcataaactttcactgactgtctttcaggggtacattttagccggtatgttgcagtctgtagccagttcttacaacctctgtattgcaccctctaatgaaaaaggacaaccccagtataaggagtctccctcccttctcccaaacaccttgtaacagactccagaacactcccaactttgttgatgtgacttcccccatcatcagtcttcacatttggcttccaagaagcctttatcaaattatttcagtcttaattttggttgacattttatatatatatatatacgtacgtgtatgtcttctgttggttctgtttttttttttttttttttggagaaccctaatgcacatcccaatagtttttcccataaccattcaatattcctctgcagacttgctacccaaagtgtagtctgcggatcagcagcagtggcatcgcctggtgtcagaaacacaatcccagacaccaagccagacacttaactcaaatctacgtcttaacactcaggtgatatatctgtgtataaagtttgagaagtacctcataacttctttggggtttatttatttatttatttatattgaaacagggtcttgctctgccacccaggctagagtacaatggtggaactcgactcactgcaacttctgcctcccggattcaagcggttctcctgcctcagcctctcaagtagctgggattccaggcgcatgccaccatgcccagctaattttttgtacttttagtagagacgaggtttcaccatgtggcccaggctggtcttgaactcctgagctcagctgatccgcccgcctcagcctcccaaagtgctaggattactggtgtgagccaccgtgcccagacactttggggttttttgtttgtttgtttttgtttttgagacaaggtctcactctgttgcccaggctggagtacagtggcgtgatctcagctcactgcaacctccacctcctgggttcaagcgattctcctgcctcagcctcccaagtagcagcgactacaggcacgcgccatcatgcccggataatttttttgtattttttttggtagggatagcgtttcactgtgttggccaggctggtctcaaactcgtggcctcaagtgatctgcccacctcggccccccaaagtgctgggattacaggcattagccaccgcaccaggccacgtcatcacttctttgaaaatgcaaaaccacctgggaagaataacaatattaaaaacaactgcttggtaaaggaatttgtttaatcaaggctttcttacctgaggacagatttttgggagtcgggtgaaaggacctagaaaagaaatcaagaagtcaggatattttcccagcaatgataggtcttcaattataaagaagagagcaaggaagcctcaatatgcaaactagcatatccaactaatacagataaactcaaggtcagagaggcaggactgggcaaatcaggccacactacattcacagagctaagcagtgccccctctttgtaatttgctttattgcattttattttctgtgttttcactgaaatggcagtttatggagaaactctcccacttggctgtgaacaggctctaagcaacagcaacacttctgcagaattggcagggacagtgctatggaatatttcacaaacttcaaggcaaagggacaaacaaacaaccaaaaaaaaaaaaaaaaaacaccctcaaaatgtattttcagaggaaagaactttcactgggaagggacccatggatctccaaaagaaaaccaatttggtttcatttttttctgcttctgcactccagcctgatgattaattcatcagcatgggacagaacaaaagctcctcttaaactgtaactactacatggggtgggtttctatgatgatgttgcagatcttggcctaatgggctttctcttcactgacacacaaggttcaatattcctgccccacccaccatgaggtgagagttgaagctgccccctttcccacctcctccagcgcccggacaaggcacgatgcagggacacgcagggcacgtgcctgcaactccacctgcctcaaaccatgtgtttactctctatcctgtagaagtgtcatcgctcccccagcctaacagaatgacatggaaaaggctggaatgtagccacactgcctcagcaaaacaatccctaggcttagagacgctgctgtccacaggcaagcaaactgggacagtggagccacagaaatgtgcctctcttcttgggggtagggtgacagcttcagtttctatctatatggagttattgccctttctctgtctctctctctctctcccccacctctctccttctctccctctccctaaagaggcagtagttaaaggcaaagagcctggtgattaaaaagcagactctgccctaaatcagacctttcttctgtcccttaccagctgtgtgaccttggcaagttagttaacatctctgtgcttcattgccctcatctgtaaaatgaggcttataggccgggcacggtggctcacgcctgtaatcccagtactttgggaggccgaggcgggcagatcacaaggtcaggagatcgagaccatcctggctaccatggtgaaaccccatctctactaaaaatacataaaaaaaaaaaattagctgggcgtggtggtgggctcctgtagtcccagctactcgggaggttgaggcaggagaatggcgtgaacccaggaggcagcgcttgcagtgagccaggatcacgctcactgcactccagcctgggagacagagcgagactccgtttcaaaaaaaaaaaaatgaggcttataatagtagtgtacttctgatagggatgttatagggatggaatgagttgatgcagtaaagaacttagtacctggcctgtgttagagacactatggatccctggctcatctacaaaaagccagactcactatccaaaggcatagtaaggccaggtgtagtggcctcccaaatcctagcactttgggaggccaaggtgggcaggtcacttgaggtcaggagcttgagaccagcctgaccaacatagtgaaacctcatctctacaaaaaatacaaaaattagcagggcatggtgatggacacttgtggtcctggctactcaggaggctgaggcaggagaatcgcttgaacctgggaggcagaggttgcagtgagccgagattgcaccactgcactccagcctgggcgacagagtaagactcagtctcaaaaaaataaaataaatgcgtactaggttcctctctctagagcccccaaaagtctcctgaaatcaacctgtccataatctcatcatattcaccccaccccattccccaaacaagaataaacaaatcccactgatctcttcttccatttttcagacaggcagttcttagccttaccatctaatggaggtactgcccaggctggaagaatgggaggcagctttgacttaacctccccctttacctttcatctgataaatgctgaagcagtttctggatctctcttcagaatgactctggaccccatttctccacaggcctctgctgctccctgagcctcctttattttagattttagatttaggacagggtctcgctctgtcacccaggctggagtgtggtggcacgatcacggctcactgcagccttaacttcccaggttcaagtgatcctcccgcctcaacctcctgagtagctgggactacaggcaggagctaccaagcctggccaattttttaatttttttgtagaaagggaggtcacattaggctccccaggctggtcttgaactcctgtgctcaagcagtcctcccacctccatctcccaaagtgctgggatgacaggtgtgacacaccgcgccccgagccttctttagaaggtacagaatgtgcactgattagagatgtgtggtgatttaacaaacatttaaaactgcctgttttgtgcaatgtaacagaccggggctgaaggaaaggagaaatacagagacacactacagacacacatagtgatagaggagggtcagcagggaaagcaagaaccaacatactgccaggccaggcagctcagcgctgtgcaggggctgatgtggtgagcacttgcttcagtttcccacatcagcaatgtcctcccgatgatggtgcccaacagcagggtccttagatagtaaggctaagaactgcctgcctgggaaaccaaagaagagatcagtgggatttgtttgttctcgtttggggaatggggtggggtggatatgagatgacggacaggttgatttcaggagatttttggggggctctaggaagagaatcctagtatgccttttaattttattttttttttagactgaatctcactctgttgaggtttgagtttactaattaagtactatattacttgctgcaggccaccataacagaataccttagaccgcgtggcttaaacagcagacattcactgtctcccagttctggagactagaagttcaagatcaaggtgccagcagatttggtttctcccaaggcctctcttcttgccagccaagaagagaggccttcttgccttctcgctgtgtcctcacgtggccaggtgtctctctatgtccaaacttcctcttcttataaggacaccagtcagattggattagggcccaccatcatggcctcattttcactgaatcacctctttaaaaggcttatctctggccaggcgcggtggctcacgcctgtaattccagcactttgggaggctgaggtgggctgatgatgaggtcaggagatcgagaccatcctggtgaaatcccatctctactaaaaatacaaaaatagctgggtgtggtggcacatgcctgtagtcccagctactcgggaagctgaggcaggagagtcccttaaaccagggaggcagaggttgcagtgagttaagattgcgccactgcaccccagcctggcgacagagcaagactccatctcaaataaataaataaaaggcttatctccaaatacagccatattatgaggaactgggggttagggcttcaacggatgaattttgaaggggcacaattcaagccataacaagtacccaacaccccacccgtgtcttctatatgctgtaaagaataagcatgcagtctgggtgtcgcggctcacacctataatcccagcacttttggaggccgaggcgggtgaatcccttgagcctagggagtttgagaccagcctgggcaatatggtgaaaccccgtttctaccaaaaatagaaaaattagccagatgtggtggtgtgcacctgtgggcccagctacttggggggctgaggtgggaggattgctggagcccagaagtcgaggctgcagtgagctgtgatagtgccactgcactcccatgtgggcaacagagtgagaccctgtctcaaaataaataagagaaagaataggccgggcacggtggctcactcctgtaatccgagcactttgggaggccgaggtggtcggatcacctgaggtcgggagttggagagcctgaccaacatagagaaaccccgtctctactaaaaatacaaaattagccgggtgtggtggcgcatgcctgtaatcccagctactcaggaggctgagggaggagaatcgcttgaacccgggaggcggaggttgcagtaagccaagatcgcgccattgcactccagcctgggcaacaagagtgaaactactctgtctaaaaaaaaaaagaaagaagaagaagaaggaggaggaggaaagaagaaaaagaagaaagacaccacagctgagtatttggagctatatagataccccttcccttcgagtttcttcctgttttttttagttgagtaactgctgaattgaattgaattctttggttggttagcaaagggtcatggaaaaagtgtcctctcttctcagaggcgtttctttaaaaaaaaaaaaaaaaagaatgggaaaatacattattgagatttccaagggtttcatttaaaagcctgtgagtaaaggagaacaatggttatgaagattcgtatcaaaaaagagaagggcccaaggcagggtgcaggagcgcagtgcctggagcctcagggcagagacctcctctgcttgggaaaggagccctttctgactgccctccacatatcccgcattaatccatggctgtgactccactaccgtctataggtgcccttcaatagctacattattcattcctttcagcatgtaagttaatttttccccgtctaaaacaagtgctgcttttatcctctcaaaactcatggtatgtaagaagcaacattccaggccctgttattgcaaatgatcagtcaagcctcagtattctaatgtataagctggtagctgaaaagtgtagcaaaccacagctagccagacattttcccctgtatttacttctcattcctgtgtcatttctctggccagctgatggaaatctaaaagatgagtgacttttccttcccctcattcattactccaagataattcctgactgaaaatgcagaacttggacattattgtaattcatttttaatagccagctagaccgggtgtggtggttcacgtctgcaatccctgcagctggagaggctggggtgggaggatcacttgagctcaagaattcgacaccagcctgggcaacagagcgaaaccccatctctgcaaaaaaatacaaaaatgaactcagcatggtggtgcatgcctgtagtcctagctaatcaggaggctgaggcaggaggatcagatgagcccaggattcaaggctgcagtgatctaggattgtaccactgcattccagcctgggtgacagaataagaccctatctttcaaaaaaaaaaaaaaaaaaaaaaaaaggagccagctaatacaggacaaaataattatctctctctctcttttttttttttttttttttttgagaaggactctgtctgtgtcacccaggctggagtgcagtggtgtgatttcggctcagtgcaacctgcaacctctgcctcccgggttcaagcgattctcccacctcagcctctcgagtattgggattacaggcacctgtcaccacatccagctaatttttgtatttttagtagagactgggtttcatcatgttggttggtcaggctggtcttgaacccctgacctcaggtgatccgcctgcctcagcacccccaaagtgctaggattacaggaatgagccactgcgccctgcccaaaataatcctttctgtcgaaaaaaaaaagtgtttcatgtaataaacactggttctaatcctaagagaaaatatatagaaaacagaactcacaggtgtttcttgaaagtaggtcacatggcaccaagtggctgagcacagaacactacacttatcttgattgtctgataaatagtattttgaattttgtttctacttgaccgatctactgtctttgcttcctattgctgctgtaactagtgactacagtagtggctgaaaacaacacaaatacaccaccttaaagttctggaagccacaagtccaaaatgagtgttccacgctaaaatcagggagtcagccaggatgcgttcttctggagttacctagcccctgtgttcatcttctgggcaaccaaaagattttgactaatattcaattatttgagcatggctactaagttaactctcctttgttttttgttttgttgttgttgttttgtttgtttgtttgagatggagtcttgctctgtcacccaggctggagtgtaatggcacaatctcggctcactgcaacctccgcctcccaggtttcagcgattctcctgcctcagcctcccgggaagctgagattataggcatgcgccaccacgtccatctaatttttgtatttttagtagagacagggtttcaccatgttggccaggctggtctcaaactcctgacctcaggtgatctgcctgcctcagcctcccaaagtgctatgattacaggcatgagccactgccggcaactctccattgtttttaatgtcaacaaatcagacaaccttttagtcaaccaaaaacaatctctcaattacacatacctagatatgtagtgaatatgaatttgaaaatgaggagaaatccaatgcaatataccccatccagcacagccactgtgtaactggcgctggtaaacatttgtaaagaaaccaacttcagtgacatttgtgacattttaaagagtaattggatgtttgttatgaatctgagtctttaatatgaaccaaccataagaaatgtcagtttaaaatcattactctttttgctagagagcactatatctgcaaacccaagccattcaagtttcacaaataggtgttttgatgcatcccctggtgatttatgttgaaatatgatttactccaaagcttaacagtgtcagtttgattcaggcacatgaaccaatcaatgcaatgtgcaaatccttcagtgttgtttgtctccactgtgaggaggctcactgttcaagtggtgtccctaacatagatcagtggctgtgaaagacattcttggtggcttcactcttttttccatgctaatggaatgtggattttgctcaggtggtaatgtgcccaatgcaggcatatccccaagggatgaatcatgattgggctaagtctgtcatggatatcacattccaacttgatagatagtcacattcctggcttcccttgcagctacattgactgttaactaataatgaactagtatcgttactaagacaggggacatctactggaatgcttctgaaaaatattattttcccctactaaaaaggaacaagaagagagtttgctggcatctctctcctcttttccgtaagagttgtggcagccatcatgaagttctgaagtgaaaatccaactaaccaggaataaagtgaaaaagagagtatggatatgggataacatggtcgattaccagactatctctggaaatgtttacttccaccctttttactgagagagaggaatatatgtacactattctctaagctggttttaattatatttcctgtcatgaacaactgagaacattcctaattgataaagagtttgggggagcaaaatccatttaaaataacaaaaaataagagaattcagccaggcatggtggttcacacctataatcctagcactttgggaggccgaggcgggcagatcacttgagaccaggagttcgagacctgcctggccaacatggtgaaacctcatctctactaaaactgcaaaaacttagctgggtgtggtggcgcatgcctgtggtcccaactgcttgggaggctgagacccgagaatcgcttaaattcaggaggcagaggttgcagtgagccaagatcgccccaggacactccagtctggcaacagagtgagactctgtctaaaaaaaaaaaaaaaaaaaagagagagaattccctacaatttagaaaaagcttttcctgtgttaataataatatcttcaggccaggctcagtggttcacacctgtaatcccaacatttcaggaggccgaggcgggtagatgccttaagctcaagagttcaagaccagcctgggcaagatggcaaaactccatctctacaaaaaattagccgcaggtggtggtgtgtgcctgtagtctgagctactcgggaggctgaggtggtaggatcacctaaacccaggaggaggtcaaggctgcaatgagccatgaccatatcactgcactccatcctgggtgacaaagtgagacaccgtcttaagagacaataacaataacctctttctttaatagagttggcaacttgttttgagctctagtcttttaaatgcaccctttctctctctctttttttttttttttttgagacggagtctcactctgtcacctaggctggagtgcagtggcgcgatctcagctcactgcaacctctgcctcccaggttcaagcgattctcccgcctcagtctcccaagtagctgggattacatgcgcctgccaccatgcccagctaactttggtatttttggtagagacggagtttcaccatattggccaggctggtctcgaactcccgaccttgtgatccgcctgcctcagcctcccaaagtgctgggattacaggcatgagccaccgtgcccggcctaaatgcaccctttcaacccaaatcatatttaatacatacttcctagattttctgaagtatagcagagtctgaagacttaatgtttatttaggtggcaaattgcggacttccttccattcatttttaacccaatgactggacagtgcactttcagaatttatttatttatttgagacggagtctcgctctgtcacccaggctggagtgtggcgtgatcggacgtgataagagttagaccaaggcagatgtaaccctagcgaagcggctacgttttctggggtatataccctggggtttgttgttgcgcgccaggaaaatttaggacacagacacacacaaggagtttaggagcggaggtttaataggtagaagagaagaaaaagagaaacagctccctccatagaggaaagggcctctgagcagaaaggactgagcagaaaaggagcagcagtggtgaatgccccgaattttatagtccggtttgagcaggtggtgtctgatttacatagggctcataggctggttcaatcaggtacgacatttacatagtgagttggggaacgctggtccccctaccctaatcttacgcaaatgggctttccagttgatggcaccatcttgtctgctccttacaatacgcatgactgacagagaagagaagagggagccgccattttgaaaaagtctagtccttagttcctccccacattcccccaggcaagctcccagcttgcttgtctatgtctgcagcttgactttacaggctgctctttgttagaaaaatgatttggggctgcttttcattaaaaagaaaagcctgccgggcggggtacaggctcaagcctgtaatcccagccctttgggaggcggaggcgagcagattacctgaggtcgggagttcgagaccagtctgaccaacatggagaaacctcatctctactaaaaatacaaaattagccaggcgttgtggcacatgcctgtaatcccagctacttgggaggctgaggcaggagaatcgcttgaacccgggaggcggaggttgtggtgagccgagatcatgacattgcactccagcctgggcaacaagagcgaaactccgtctcaatcaatcaatcaatagaaaagctttatggaggactcccgtgcccttactagctgcctaagtaatttctttttttttaattttttttgaaacggagtctcactttgtcagccaagctgtggtgtaatggtgcgatctcggctcactgcaacctctgcctcctgggttcaagcgattctcctgcctcagcctcccgagtagctgggattacaggcgcctgccaccacacccagctaatttttgtatttttagtagagatggggtttcaccatgttggccaggctggtctcgaactcccaacctcatgtaatccacccacctcggcctcccaaagtgctgggattacaggcgtgagccactgtttccggccagtaatttcttcttaactcctgtatcactagtttgggaggaggggaggaggcaaggaacaagacagagaaggtacagtcgcctacagttgtcattgttttgtccgcttggcacatatctcctccctttcttttagtattaggaactctctttctcacggagaacccattaacccattcccgtgtgatttagctggagttcttccagcagcatcatacaagtgggcacatggccaaccctcccaggccaatcagagtgcatgccattttccgggttactgtgatgggttgagaggtgggctcaaaagctgtgagtcagaacctggctgggccagtcggaattgctcctccagttttcctatggaactcttgggagaatgacatgttctctagagcagaagccatgaagaaagctaagctgagagctgtcagagatgatcttggcttccatgtggagctatctggccagagaatatggcccaaaggaaagcagaaatgacagagaagcaggggtacaggaaaggggtctaaatggcataatttggcttcctgaatccaactctacctgaagccattcccattccttacttatgctgcccagatatggggaactaatacatctctttttttccttacagtggtttgaattgcatttatatcacaggcaaaaacaaaaaacaaacaaacaaaaaaaacaccttgacaaagatggaaagtaaaggagaaagatggagactgggttggacaggatgggtggtctctgagggctctaaatgccaggcagagaagcttgccttattatgatacataaatcctttctggaaagaggtgagaaatgctgttatccacctttagctctgattcttcccttcatgtgctgaggggcactaagaagactctttcttttaactgtaagaagagggtaacagccacatttcactccaaaccattaatttaataagtttagacagaagagattattagcctcagaaggtgttgctttcattatcattgaaatgtgctttttctgctttctactatgttctattcttccctccctgaatgcccacatgcaaattagggaatgttgcaatgcccagagcagagttataacatccagctgtactacaacagcagttttacataaatggccatcctctaaactgtggacatttgataaagtatgtgggctcttctcataattaaaagcccaaaagggaaccaaggaaacacagagaacattattctagtgacttataaaactgggctggagaaaatctcctatgtctagaggtggaagagaaaggataaaaaaggagaaggagtagaacagaaaatgcaaatgagaaaaagagatggcggtggaaagaagggctgcagtagaagacaggagagaatagagcaagcagaggcaggaagccaagtacgaaaaggaggagaggagtggggagtgtttagatcaagactcttctcttggctgggcgcagtggctcacacctgtaatcccagcactttgggcggccgaggcgggcggatcacctgaggtcaggagttcgagactagcctggccaacatggtgaaaccccatctctactaaaaatacaaagattagctgggcatggtggcacacacctgtagtgccagctatttggggaggctgaggcaggagaatcgcttgaacctgggaggcggaggttgcggtgagccaagatcgtgccactgcagtccagcgtgggtaacagagggagactccatctcagaaaaaaaaaaaagccaggcaaggtggcttttgcctgtaatcccagcactttgggaggccaagacaggtggatcacgtgaggtcaggagttcgagactagcctggccaacatggtgaaaccccatctctactaaaaacgcaaagattagctgggcatggtggtgcacacctgtcgtcccagctacttggggaggctgaggcaggagaattgcttgaacctgggaggcagaggttgcagtgagccaagatcgcaccactgcactccagcctgggcaacagacagagactccatcttagaaaaaaaataaaaataaaaaataaggccaggcaaggtggcttacgcctgtaatcccagcactttgggaggccaaggcatgtggatcacgaggtcaggagttcaagaccagcctggccaacatggtgaaactccgtctctactaaaaatacaaaaattagccaggtgtggtggcggatgctgttaatctcagctattcgggaggctgagacaggagaatcgcttgaacccaggaggcggaggttgcagtgagtcgagatcgcaccattgcactccagcctgggcaacaagagtgaaactccatctcaagacccttctcttctctggacctccatttcctcctctggggcatccataggcagagccaactacataatttgcagggcctgatacaaaatcgaaacgtggagccctttgttcaaaatgtactcaaaatttggaggcagcagcagcacagcattaaaccaactgtggggacctgtgcaaccatggaggtcacatgcccatgaagctggctctaataaattagatcaggattttcagaaggtgttctgtaaactccagatattccaaaaacaaaagattccttattctcatctctaggaagtggggcacatttccccatcccttcattgaagattcaaaatgcgcgtgaactgctccagaaagccctgcttgaaagcaagaaacgtgtgtgccttcatttcaaccagtttctcaaatgtatttgaccatagcaacattttttccccaattctccatattaataccccatataacccattttgcaaaatgcttgaagtcgatggtcttgaggtccctggagctagaaaaggcattagcagtcacccacagcagcccctcctgccctgagattggatgctcacaaatctgctcttcttggccttgatgatgacagtggtctctttcttccagatttgatgagtgtggggcatgggaggagattactggggttgcaaaacctgcagcaggttctcaaagatgacatatcaactcccctaaatgcccctccactcaggcaccatgaaagcctttgttttaatacactcaaaatgttgcctcttcacggccgggcacagtggcttatgcctataatcccagcacttcgggaggctaaggcgggtggatcatgaggtcaagagatcgagaccatcctgaccaacatagtgaaaccctgtctctactaaaaatacaaaaaaaaaatcagctgggcgtggtggtgcatgcctgtagtcccagctactcaggaggctgaggcaggagaatcacttaaacccgggaggcagaggttgcagtgagccgagatcacgccactgcactccagcctgggttacagagttagactccgtctcaaaaaaaaaaaaaaaaaaaaaaagttacctcttcactaatttctaatctccccagaaaatttgtaagggggttttgataccatatgtaggacaggaataaatacaatgtttatagaactcttgcatctcagatcattgtattcaattcaaagtgtgtaattttatttggggaggatttatgctgagaactatcagtatcccagcgcctttgatcaggaacccaggaactcctaaagtgtagaccattatcccctatagagattagttaactttcaatctgggtaagaagaataaagtttttttgcaaaagaaagcccaaatgccatctttttccttctccataaacactaggataagaagagacttataagtagaagcttgaggttgaatctcatctctatctttgttgcactgaactaatcactacatcccctctctgcctttgttttctcatctgtaaagtgggaataataatagtagcaaagattcttctagcaataagataaatgcatgagaaagctgtctaaaaattgaactgtagcaagcatggctaaagcacttcttacctattacaaatgtctagagccaaatttccacagtacggcatggacagatgattttaaaatcagaaagaaaaaaacagttataaaaatacttagtgagatttggccaggcatggtggctcacacctgtaatcccagcactctgggaggccaaggcgggcagatcacgacgtcaggagatccagaccatcctggccaacatggtgaaaccccgtctctactaaaaatgcgaaaattagccaggtgtggtggcaaatgcctgtaatcccagctacttgggaggctgaggcaggagaatcgcttgaacccagaggcggaggttgcagtgagctgagatcgtgccactgcactccagcctgggtgacagagcgagactccgtctcaaaaaataaataaataaataaaaataaatacttagtgagagtctccctcactggtcactttgcttgggggttcaaattataacccaaagctatggaatatgcttacttgggagattcttacagctcctatacatgaatctttttgaaacatatcaagggtccttagaaatctgatctggtgtgactctcagagcactctgatgacacctgctggctaggcatggtgtgacaagtgtgttctagtctggacagacggagatggtctggaacccctgagtggagtacctgggaagctgaggctggagagaaatcctgaccttcaatcttgctgtgcaaagtgtggtcctagggcctgcagtatcgggatcactaggagcttgtaaatgtgggatcagactctacatttttttttttagagaccgggtcttgctgtgttacccaggctggtctcaaactcctaagctcaagcaatcctcctgcctcagcctcctgagttgctgggaatacaggcactggctcagactctacattttcatgagatcctccaagtgattcgtgtgtgctttagcgtgaaagaaacatgttctagtgttctagaggacttaatctagtgactaagcgtctatgtcaaagaaaaaaattttttctttttttgagacaagaatctcactctgtcacccagacggtagtgttattgtgtcatcccagttcactacaacctccacctcccaggctcaagcgatctgcccacctcagcctaccaagtagctgggaccacaggcacgagccaccacgcctggctaatttttgtattttttgtagagacaaggtttcaccatgttacccagactggtcttgaactcctgagctcaagcaatccacccacatcagcctcctgaagtgctgggattacaggcatgagccattgtgcctggctgaaaaaaaaattttagctccacatagggctagcaactcacagaaagcttggcacttctgctgtttctggtccaagcctttcgttacaccagtgcataaacaggcccattgccccacaacagtttttcttattttcatttttatcctgttttctacttattctgttgaagacatttttcctcccagaggaatattcctacaattctgtaacaaaatgataggaaaacaggattcccattacagaaaatttgctttaagatcgtatttttcaaaatacaaaggtttcttagaagtgtttttgtgctttttttaaatgttctgtgtactggtcatacctacaaataacaaataataataatagcacggccaggcgcagtggctcactcctgtaatcctaacactttgggaggccgaggcaggtggatcacgaagtcaggagtttgagaccagcctggccaacagtgaaaccccatctctactaaaaatacaaaaattagttgggcatggtggcacgcacctgtagtcccagctactcaggaggctgaggcaagagaatcacttgaacccgggaggcggaggttgcagtgagctgaatttgcaccactgtactcctgtctgggccacagagcgagaatccatctcaataataataataacaataacaataataataataacagcacaagggaagcaggactggtgctctccccacaaacacctgatacattcatttctgttgccttgtttgtaatagaaatagagtctaggtaatataagcaaaaaagaaataaacaaaggaaatgtattagatggatatggtggtggcttatagaaaaacagtacaagctgaacaacgacatctcacaaaggacaggaaacggtattaggtgtccaggaagctggtgtttccagggcaacacctttgggacaattgttttcagccctgcctgtgtcactgatcagtatacaaattctggggatagagagtctgttaggcctcacttggttcatgtccagcctttggataaagaagggcaggacattctgatttcaggactccccaaaagtgtatctgcggaggaaggcagggttgagcatccattctggttggttgaatgtggtcatgcccaagcattccagttgttgcagattttgactatcaccctgagagaggggtaaatccccagaggtgaggttttcaacggggtgtggtagctcacgcctgtaatcccggcattttgggagactgaggtgggcggatcacctgagaccagcctggccaacatggtgaagcactgtctctactacaaaatacaaaaattagccagatgcggtggtgggcacctgtaatcccagctacttgggaggctgaggcaggagaatcgcttgagcctgggaggtgggggttgcagtgagccaagatcatgccactgcactccagcctgggcgacagagtgaaaatctatttaaaaaaaaaaagaaagaaaaagaaaattgatgttttcaagctgaaaagaagaaaaggttaataggcaggtgaaaccatgcctctgtattgtgagatacatatcccccatagtattgactggtaagaatatttatagcctatttactctaaagcccatgtattattattattccaaacccattgattattattattccaaaacatatctatttttaactgtttaagcacattattggaacatgcactgagagcttgatggtctttgattcttcaaggcaaatcaactttctaccacgtcatcggaataaaacagaaattaaacagttgaaagggcctctactcccccaagacctctggtgtccacccccatctaatattcttatgtattcataggcgatgttaaataaatggcaagaatctcctatttcttttttacataagaagaaagactgcatagctatgaaaaatacactctgtcaccagagccacgcaagagatctttagaggaataaatagccgcagtctcatagcaacattcagatgaacaatgctgagagctgaaagatgttcttcggttagaaattcatgcctacaaaagaataccatccacgaagttcctcactgttaattacagatagtaaagccagtccacaggcaatggaaatgagggtccatcatgcagccggcttcttgggaaggactgaccaatatcctcagaaagctaaaatgaatgaatatgcttttttttttttttttttttttttattgatcattcttgggtgtttctcgcagagggggatttggcagggtcataggacaatagtggagggaaggtcagcagataaaacaagtgaacaaaggtctctggttttcctaggcagaggaccctgcggcgttccgcagtgtttgtgtccctgggtacttgagattagggagtggtgatgactcttaacgagcatgctgccttcaagcatctgtttaacaaagcacatcttgcaccgcccttaatccatttaaccctgagtgaacacagcacatgtttcagatagcacagggttgggggtaaggtcacagatcaacaggatcgcaaggcagaagaatttttcttagtacagaacaagatgaaaagtctcccatgtctacttccttctacacagacacggcaaccatccgatttctcaatcttctccccacctttccccccctttccattccacaaaaccgccattatcatcatggcctttttttttttttttttttgagacaaggtctctctctgacccccaggctggagtgcagtggcacgatctcggcccactgcaacctccacctcctaggtttcagcaattctcctgcctcagcctcccaagtagctaggattacaagtgcctgccaccacgtctggctaatttttgtttttttagtagagacgggtttcaccatgttggccaggttggtctcgaactcctgacctcaggcgatgcgcccatgttggcctcccaaagtgctgggattacaggcatgagccactgcacccagccaaatctgcatattatagagaggtctcagtaaccagacccgtaacctcacagaggcttcttaagtgttttcttttatattctgtgccctggtcacacctacaaataacaaataataatgataacagcacaagggaaacgaggatggtttccctctcctacttgctacagacctacctccacaaatagagctgatacattcgtggagcctatttgaaggcttacttctctgcttaaaaactcttccataaagtaaaatatcgacttttgtactctctgggggatctggcatccatggcccaagtagttagtaaatgcacattttttctttttttctttttcttttcttttttttgagacagagtttcgctcttgttgcccaggctggagtgcaatggtgctgtctctgctcactgcaaccctgcctcccaggttcaaatgagtctcctgcctcagcctctcaagtagctggggattacaggtgcccaccaccatgcccgactcatttttgtatttttagtagagacagggtttcacttcgttggtcaggctgttctcaaactcctgacttcaggtgatccacccacctcggcctcccaaagagctgggattacagtgtgagccatcaagtccggactatcctcatatgttttaataagaagctaatgttttcccccagattctggagacacagtgaccctctaggaagcggtggcaggtatacagccatggttacctgactgagacagctcaggacagagcaatggaactggagtcccctcctggctttgtcatcttgttccagagtgggctagcccaggaacctgacttcactgcacctcagtttccccatttagacaattaagtggcagatttctgttcactcctaatgcagctctaaaagcctgcctttctagttatcttctaggggtagaaaagagagtcagaagaggccgggcacagtgactcatgtctgtaatcccagcactttgggaggctgaggtgggctgatcacttgaggtcaggaatttgagaccagcctgaccagcatggtaaaaccccatctctactaaaaatgcaaaaaaaaaaaaaaaaaaaattagccgggtgcgtgcctgtaatcccagctacttgggaggctgaggcaggagactcacttgaacccaggaggcggaggttgcagtaagctgagattgcatcactgcactccagcctgggcaacaaagcaagtctccatcctaaaaaaaaaaaaaaaaggagaggtggggagggggagtcaatataaatgaacagaaagccacctctcccactttaaatatatccgggccctctcaaaaaaaacctcacatttgaaactttcctttaggttccccatctctggcccatggactttgggggagcaggtccaggaaataagtcctttaattggaagccagaagtataagaaaaatggatccaggagtttatcctttaaataccaaatccttgattgggcctccttccaccaactgttctttctttatctgaacaaaacagcagtggtcggtaccaaaaggcaccgtccaccgtgctggtctatttctgtcctgcattgtcattctaaatgctgagacgatggcttatcaggaccttggagagatcaacgctatcctgagagattgaattaaggtattggtaaatgcctgccaagattgaattaagattggtaaataccttggtaggctagaacaatggatgaaatctaacaattgaaatttaatcggaaaaaaaaagaaatttaatcaggataaatgtacattctggtccacagaataccaagtgcataaaaataactgatactatggaaagaggttgttggtctagaatgttcaggttactacaatctcaatctgtgccaataggatgacttagtgcccctactcaactcaaacgtagcatagtgtgggctttgatgaacaaagctgatccaagcaagagaagaaaaatccccccgtcctttgctcaggccacatctatgtcattagcatgacttgagtgtcaggaaggaaagccagatagactccagtcaggtgagcggtggccctgctggatggagagaccatgaaaagaatacaaaattcagccagggcctgaaaaggtgaatgaagacagcagcaaccttaatgcagaatctcagccaccaaaatcaggtgctaaaattaaaaggggttgagaaagaatcacacaggaatgtgaaagagttgatgggatggaagtgccagatggcaggacattaaggtatcttaaaagagctaaaagaaaggcaatcaaggccgggcatggtggctcacgcctgtaatcccagcactttgggaggccgaggtgggtggatcacctgaggtcaggagttcaagaccagcctggccaacatggtgaaaccccatctctactaaaaatacaaaaattagctgggggtggtggcaggcgactgtcatcccagctactcaggaggctgaggcaggagaattgcttgaacccaggaggcggaggttgcagtgagctgagattgcgccattgcactccagcatgggactctgtctcagaaaaaaaaaaagagagaaatagactttctgaagagaagagagaaatagactttctgaagagttcatctgaagagctatcctgcaggtgacaatgtggtgaggctgtgatgataatgtcccatgaggaccatggaagaaaatgagcttgctgagctggggaagagatggaggtgagatcttcaaatctggggaagacatgttcaaatgtgtgaagggctgtaacatcagaaggacttccaaataaacatggcagattgaacacatatatacatatacatatatatctatacgtagatagagaaatggaatatgttgataaataatattggtcttttaagagatttcagtattggaagtttgatttattagattttgaagagttgtttaagcacctggggaggttttgctttttaagttggaaaatcaagcctaacaactctgtagtagacataaagtataatgatcaaagaccgtgggagacaaggcaacagcagacaggatgtatcaacaaaatgtctgaaaatggtaagttctgactgggtgcagtggtgcacgcttataatcccagcactttgggaggccaaggtgggaggatcacttgagctcaagagttcaagaccagcctgggcagtatggcaaaaccccatctctcaaaaaaaaaaaaaaaaaaaaaaaaaaaagccagatatggtggtgcatgcctgtggtcccagctacttgggaggctgaagtgggagcattgcgtcaccctgggaggtctcagtgagccaagatcacaccactgcactccagtatgggcaacagaggaagaccctgtcaaaaaaaaaaaaaaaagtaaagtaaagaaaagaaaagcaacaaggaaggggaagcgaaggggaggggaaggggaggggaagaggagggaaggggagggaagggaaggttaggttctgatggtgaagggaaggttctgatggttacttcaccaagcaagagaagctctggttgctgaagaagttcctacagagggggatcctgctatggtctgaatgtttgtttccctcccaaattcatatgttgaaatcctaaccccatggtgatggcattatttaatagaaggtgggggccaggcgtggtgactcacgcctgcaatcccagcactttgggaggtctaggagggcggatcacaaggtcaggagatcaagaccatcctggctaacatggtgaaaccccgtctctactaaaaatacaaaaaattagccgggcatggtggtgggtgcctgtagtcccaactacttgggaggctgaggcaggagaatggtgggaacctgggaagcggagcttgcagtgagccaagatggggccacagcactccagcctgggcgacagagcgagactccgtctcaaaaaataaataaataaaataaaagagaaaaaatagaaggtggggccttttgggagaagtagtcagaatcaaaatggactcactaatgttaaaaaaaaaactaaacaaacaaaccaacaaacaaaacccctggcacatagagccggggaagaccatgaagagaggattctcttgcttatacgcctagtaacaaaactatcacaaagactgcaaaactcacaacctagcacaatggccatgataacctcacacaaaagaatacttttgtgactgggcacggtggctcacctgtaatctcagcattttgggaggccaaggcaggaaggattgcttgagcccaggagtttgagaccagcctgggcaacatagggtgactccgtctctacaaaaaacacaaaaacaaaaaacttttgcaaggacatctactcagcaactacgtccaaccttgtactggcatcacctttgttactgatctttgcagccaagaataattatttcaaaacaattatgtaatcttcttcactttttcctttaaaaacctttgttttcttttacctccctgaatacgtacctagtttactatggcatgcatatgcccattgtaatgctcttttcccaagtaaacatcattttcttttggagagcctctgtttatttaggttgacagtcataagagtggggcccttatgaatgggactagtgccctataaaactgatttatgggccaggcatggtggctcacgcctgtaatctcagcactttgggaggccgaggcgggtggattacctgaggtcaggagttcaacatagtgaaacccccaacatagtgaaacccccatctctactaaaaatacaaaaattagccgggcgtggtggcatacccttgtaatcccagctactcgggaggctgaggcaggagaattgcttgagcccacgaggcagaggttgcagtgagccgagatcgtgacactgcactccagcctggccgacagagcgagactcagtctcaaaaaaaaaaaaccaaaaactgatttatggtaacagaaatatgaatgggctgggcatggtggctcatgactgtaatgccaacattttaggagtccaaagtgggagcatcactagtgcccaggagtctgagatcagcgtgggcgacatccctataaaaataaaaataaaacatctctacaacatctctacaaaaataaaaataaaaaattggccaggggtggtggtgcatgcctgtaatcccagctagttgagaggcagaggtgggaagattgcaccaggaggttgaggccacagtgagtcttgatcacaccactgcattccagcttgggcagcagaacgagagcgtgacacacacacatacacacacacacacacacacagaagtcagaatgatggttggccttggggatggaggtgattgctggatgaaaaggcacagcatgcagtgggggagcttctaggatgatggcaatgtcctaaaatttgatttggtcagcagttacacaagtgtggacatatgtaaacgtagcaaactagacatttaatattagcgcactctatgtaagttacagcgcaacaaaaaagcaattaaaactcttgcgtgtggggaaagatgacccaggatacagaaaacctaggctgcaactcaagaagtcctggggggtagttattgtgcagacagcctgaggagcaaccattctgccccccctccccccacagcaggaggatggggcgagaaaaactaggtaccaataataaagcaggtgtagttggccatatggaaaatagtgttcagatgagttttgtaattcagttggagaatttggcaagaattagtaatggcagcttaacccacatccaaactagtatcctcaattttctatatcttctctgccacatttggcagaagaaaaagagagatacttagaaaagatatagaaaactgagggtactagtttggatacaggttaaactgctattaaaaaacagactggggccaggcacggtggctcatgcctgtaatcccagcactttgggaggccgaggcagacagatcacttgaggtcagaagtttgagaccagcctgaccaacatggtgacaccttgtctctactaaaaatgcaaaaattcctgtaatcccagcactttgggaggccaaggggtggggggcgggggggagggggggggtggatcacgaggtcaagagttcgagaccatcctggccaacatggtaaaactccgtctctactagaaatacaaaaaattagctgggcatgatggtgcatgcctgtagtcctagctactccggaggctgaagcaggagatcgctggaacccaagaggctaaggttgcagtgagtagagatagtgccattgcactccagccgggagagagagcaagactccatctcaaaaaaaaaaaagcaaaaattaaccaggcgcagtggtatgcacctgtagtcccagctactcaggaagctgaggaaggagaatcacttgaacccgggaggcagaggttgcagtgagctgagatcctgccactgcactccagcctgggcaacagagtgagactccatctcaaaaacaaaacaaacaaacaaaaaccccaaaacaggctgggcacagtggctcacacctgtaatcccagcactttgggaggctgaggagagcagatcacttgaggtcaggggttggagaccatcctggccaacatggtgaaaccccatctctaccaaaaatacaaaaattagcctggtgtggtggtgcacacctgtagtcccagctactcgggaagctgagacaggagaattgcttgaacccagggggtggaggttgcagtgagccaagatcatgcccctgcactccagactgggcaacagagggagactctgtctcaaaaaaaaaaaaaaaaggagtagctatatttcaagcattttaggtgaaataatatgatgtcttagatgtcttggatccagtggtaagagaaaaggatggggttatgtgtgtagttatatctgcctgatttagccagaataagtcagagaggcctccctggaggaggcagcatcagagttgggactgtagagggtttgccacatgaagaggggagagggctttccacaaagaggaaacagctggaagaaagacatataagccatagagtgggtggtattgagatcttgagaagatgttataattatagcaaagagtaaggggacagagaaggggacatgtttagagatgggaaagggtctgagaggaccttctaagggtgttgagtctattcctataggaactgagtctggtgtgtgtacgtgaagatgatgctatctactaagctatactcttttcagacattttcttgagggtggtcatttgctctcaaaaaggtacatagattgaggtcaggagttcaagaccagcatgggcaacatagcaaaagcacatctctaaaaaaaatttttaaattagccaggcatggtggcacatgcctgtattcccagctactcaggaggctaaggcaagaggatggcttgagcccaggagtttgaggctgcagtgagctatgatcatgccactatggttcagcatgggggacagagcaagaccctgtctcttaaaaaaaaaaaagtacatagagaattgagtgctctagaacctgaagaatcccagcaatccaaatgatctgatctgatccactctttatgatgaggtaagggcctcagagaggtcccccaactagatatcagtggagctgggattagaactgggtctcctgacttccaaattacctcattaaacagggatgccaggttacaactgggactgggggcacctttctcattgtatacataaaaccatgaaaaatgtaaaacacaagaatacatcagcacacattcattggctgtcagaacaaaaacatcatcacgttggacaacctctggaaaactccactacacactcatgagtgaatgagagtgaaaaaagcaaacactgtcttagtattgttaccaaacagtatttgacctatttggagcatgaaggtacatagtccaggggcacccatctctatggaataaaatgcaagcggcacctcctagagttgtgcagtggccctgtgcccaaacctggcattcaagccatcccccaggagtaatcctaaaagcacattcttgaggctgacctgggtgggtaatggaggcggtgactgagaaaacattgtttctctatatgcagccaagtcgcccctatagaactcaacccccagatcctggctcaatcaactctgctctaaggatctcattctgctaacaaaggtccagagaaggaaggagtcacatgtttctcagaggatacgtggataacaaaaacaacgccatccagtttgccaaaacaaagtctccctgtggccctgctgtcactttccaagctacagacaagtgcctttttccccctaactctcaactcagcattgtgggaactaaacatcacaatcagcttcaggagcctcactgttgccatgggttacatgaattcaaatctaaggatggaaccaaaacaggcccttaaatatcagccctcgagtgggaggtgaaatgaagtgctctaacaccttaaaggaaaacaggagacgcgtggcaaggggtgggtcccgctacagcaggatgggtggttgctgcctggagcctcgatttgttaacagctgctaaaaatattctctgtgtatagggcttgcaagtcttggcggatacccagagaaataagaacgaatgtctgaaactagacctgcgccgtccaatgatagccactggccacaggcggccattaagcacttgaaacatggctagtctgatttaagatgtgctataagcgtaaaacccacaccagatggcaaagactcaggatgaaaaaggaatgtaaaagtcactttaataattttaggttattttgtacagtagtcactgtattgggttatcttaaatataccatatagtgagttatcatacagaactaaataaatcgggttaaataaaatatattactagaattaatttcacctgtctctttttactttttaaatgtgggtactggaaaattttaaattacatatatggcttacatttgtggctttcatttgtgaattacattctgtttctgctgggctgcaaactgtgggtacctttttccaaactcatcccaactcccattcaaatccttccctttctttttccttttccacatttctctctctctcctttttttttttttttcttttttttttgagatggagtctggctttgtcacccaggctggagtgcaatggcacaatctcggctcactgcaacctcttcctcccggattcgagcaactctcccgcctcagcctcctgagtagctgggattataggcaccaccatcatgcccggctaacttttgtatttttgtagagacgggggtttctccatgtttgccaggctggtcttgcactcctgacctcaggtgatccacctgcctctgcctcacaaagtgctgggattacaggtgtgagccaccgcgcccagctcacatttctcttttagtatcacattttctattttttttgacaggaaaaatggctcacttgtatcattaaataggaagactaataaatagttaacattatttaaaagactaaatgctaatgctttacctgatttatggcatataatctcccccaactatcttataaggtaggtattgttattagcacagagaggttgagctatatgcccaaagtcacacagctagtaaatagaaaaactaggattcaaaccccaggaagtctgtctcccaagccctcgctactccacctaccataaaagaaatgggaaattctaatagacatctcttgtgaacagttgattgttttttccgcatttgcagtgccctggagccctaggtaagatggcagtgaagcttaaaagctagtggtgggctcctaaaatgtgtccaccggtgctctgaactgaattgtgccccctccccatctttacccacaatatgatggtatttggagatggagcctttgggaggtgatgaggttcagttgaggtcatgagggtgggcctctcttgatgggattagcgtccttataagaagaaaccccaggagcttgcatgcactctctctcctgctccaacacacactgaggaaaggccacatcagcacacggcaagccaggaggagtgcccccaccagaacctgaccatgctggcaccctgatcgcagacttccagcctccagaactgtgacaaatacattcctgttgttgaagccacccagcctgttgttttgttatggtagcccaagcagatgaaaacatcagacccccgagtttggtcactgcggctgaaacagccgatctctgagaacttgttatgcattaagagcctattgagggggctcttagccttggaggatgcgaacaggcaggaaagactcaatgaaagcgcttatagagacttcaagtggcagaggacaaaggaatgacatagccgggaggggacagggatgctgggctgaagatgagggaatagaaggaggttaggggcacactgtataccataaaagatccagagtttttaatgaggaaaggctgtaagatgtgtgcacaacagaagaaccaatatataccataaaagatccacagtttttaatgaggaaaagctgtaagatgtgtgcacaacagaagaaccaatatcccaataagtgggatttagagaaagagaatttacctattgacctagtgaggctaccatatccgattatctttttttttcttttctttttttttttgagacagagtcttactctgtcacccaggctggagtgcagagtgcaatggctgggattacaggcacatgtcaccaagcctgggattacaggcacatgtcaccaagcctggctaatttttgtatttttagtgaagatggggtttcaccatgttggctaggttggtctcaaactcctgaccttaggtgatccacccaccttgaactcccaaagtgctgggattataggtgtgagccaccacccccagcccatatctggttatcttaagctctgggctcaaaccatggtgcttccaccagttacaaagttggctgcttataattattagaaaaagtatttaagcagtcaatgtggtaaggatttgcttcctgtatatttaatgtggattgcagtcttatcccaagaaaagttccctctccctgcttgtgttcctgagggctttggggatggaagagaaaagggtaggattgatgtcagccccatggcacatcccgggagccccctcatcagagcatgtgatctgggatcccagagggagcatgctgcatatggagtcacaactgtgctttgtttattggcagaaatgaagtttgaaaacaaatggtttatagcaggtgtccccatcccctgggcagcagcagcgcctgccaggtaccgttctgtggcctgttaggaaccaggccgcatggcaggaggtaagtcgtgggacagtgagtgaagctttatctgtatttacagccgctcctcatcgttcgtattaccatgtgagctctgcctcctgtcagatgagcggcagcattagattcccataggagcatgaaccctactgtcaactgcaaatgcaaggcatagatctaggttgcacactccttatgagaacctaatgcctgatgatctgtcactgtctcccatgacccccagatgggaccacctagtttcaggaagacaagctcagggatcccactgattctacattacggtgggttgtataattatttcattatatattacagtggaatcacaatataaataaggtgtacaataaatggaatgtgctcaaatcatcccaaaaccatccctcccacccccatgtatggaaaaattgtctcccatgaaactggtccctggtgcctaaaaggttggggaccattagtttaaacatgatcaaagagaatcaaagcacatcagagtgatcaagaggaagtgaaatgatggttagagggcaattacaagggagaaagtgacatgcaaaggaaacccaaaggcaccaggggcttcagtgtcagggtgcagtcatgtggataggaaagtgccttgaacccaagtggctccagtgcagatcccagagctggcacttaaaagctgtggaactgtggccgggtgcggtggctcacacctgtaatcccagcactttgggaggccgaggcgggtggatgatttgaggtcaggagttcaaaaccagcctggctaacatgatgaaaccctctgtctactaaaaatacaaaaaaattagctgtgcgtggtggcaggcgcctgtaatcccagctactcaggaggctgaggcaggagaattgcttgaactcgggaggcagaggttgcagtgagccgagattgcaccactgcactccagcctgggcgacagagcgagactctgtctcaaaaaacaaaacaaaacaaaacaaaaacagctgtggaactgctgaaccttctcccttccccttcccctccctccctccttccctccctccctccttgcctccctcccttcttccttccttccttccttccttccttccttccttcctccctccctccctccctttctcccttccttcctttccttctttctttcttttgagacaggatcttgctctgttgcccagattggagtgcatgatcatagctcactgcttgaactcctgggctgaagcaatcctccaacctcagtgtccaaagtagctgggactacaggcgcgtgccaccacacccagctagtttttaaatggtttatagagacagggtcttgctatgttacccaggctaatctcacacacctggcctcaagtggtccatggaacccttccagtctgcattaccttccattcgaacaagaatcgtggcagaaaaaacgtccaacggtgaccgcgacaacatctcccatccacgggctcttcttacaaggacactttaactctcctcctgcggagaggtgaacttgaatctcaggaagagtagaagtgatgctgtgtgacttccacgtctatagaaggcggtacagcttgcatccggctcccttgcccgggacattcgttcttggaacttgcaatgctgtgaggaagctcagtcccgtggaggggcctcacgcaggcgcactgcagacatccccggcagagggtgcagccggcggcagcagcagctgcaaggcatggaggtgatgaacctcgggatggatctggccccagccactgggcctctcctgtgctctaagtcttcccagctcagacatcatggagcagagacaagccccttccaaaccctgacccagagaagccgtgagcatcataaagcagttatggcttcccaccactgtggtttgagtcatttgttatgcagtcatagataaatggaacgagtgtaataaaaactaccttggaggctgggcgaggtggctcatgcctgtagttccagcactttaggaggctgaggtgggaggattgcttgagaccagtgggagaccagcctgtgggcaacatcgcaagaccttgtttctacagaaaataataataaataaataaaataaaagccaccttgagagttgtgagaaccagagataacatgacaaacacctaattcgctgcctgtcttacagccaaagctcagaaatgctaactattatcaccattattgagaggtgagaggatccggatcagctagctctatttatcttgtcctgtcaatcaccttttccccactccccactgtcccctacacttccaagaaacctgagagtcaacccagtgtagcaaaccctcctcctctataagctcaagccactttcttctacctggaagcaatgaaggtgtttttaggggtcaggagaggtgggggcggcacgcgcctgaagccagctgtgtgttatgccaagcccttcggtccaactggccaaatctccttagcccattgcatcatgtagatcacatgtctttattcttttgccttttgaataccacgattcatttggatctggggctgaccctaaattattattattattatttttgacgcagagtgtcattctgtcacccaggctggagtacagtggtacaatctcagctcacagcaacctctgcctcccgggttcaagcgattctcctgcctcagcctcctgagtagctgggattacacgcacgtgccaccatgcccagctaatttttgtatttttagtagagacaaggtttcaccatgttggccaggctggtctcaaactcctgaccttgtgatccacccgcctcggcctcccaaagtgctgggatcacagatgtgaggctgacactaaaattattgcagggtctctgttgacccaggtgcatcagaatcggcccagggatgccaggggaggagccagcacagccttggttgagaatgtaaatagctacagtgtcaactcactctcccctcagttggccgcaaccagtggaatcctgctgcaaatcacttcactgtgtgttgtgacatgatgcaggtttagggaacaaaggttctccaccctctcttggagctgttaggcagacccacccacccactctaccatgtgtcttgaacaaggtgtgtctcttgcaaagtagctctccctccctctgtttttttttttttttttttttttcctctccaaattgagttgtgaaacaaatgcagaaacaaagacccaacatccaaggtcaaacaattcaaggcaaagtttacaaccatggaaatgaactcttgcatttagatgatcactgaattcaggttaataaagccccagaggcagccttccttcgatgttcacattcacggccatcgtgagaaacttgtcaaatgagtgttatggctgggcaagtgtgtgtgggaaatccaggcaccccactatgttccacgatccaaaccgaaatgctggaaggtaaatatatttccagagtggggacattgtgttgctgtgcggttcaagtcaacacacattccctgagtgcccaactgcagtgttcatgaggcacctgtcatgagccaggccctctgctgagcaccatatgtgcattacatcattttgtccttatagcaaccacaaagggtagatactctgagagtttccattttacagatgagcaaatagaggcttggagggttaattcagggccaccagagttatcacaaaacaaatttaggatttgaacctggtctgtgtaatatggacgtcaacctctgtttcactagcctcgaccacaacctctgctgtaagtgccaggcactgcccatgcttctggggggctcggtaaactccatggacctttattaaggccctattttgtactatgttaaatgtatggagaataaaaaatgactaaggctggagaataaaaaatgactaaggctcaagacagctccctacataatagagaaaggaatagaaaatctttcttttttaaagactattgtataggtggggcacggtggctcatgcctgtaatcccagcactttgggaggccaaggtgggcagatcacctgaggtcaggagttcgagaccagcctggccaacatggtaaaaccctgtctactaaaaatacagaaattagccgggcgtggtggcaggtgcctgtaatcccagctactcagggggctgaggcaggagaaccacctgaatccgggagacggaggttgcaggcagccgagatctttccattgcactgtagcctgggtgatagagtgagattctgtctcaaaaaaaaaaaaaaagactattgtataaaatgttgtgaaaattcccctccccaactgcgaccaaccaggatatcccgttaggcttgcaagagcactcccaaagtggccaactgttgtgggttgaattgggcctcccaaaaacataagttgaagttctaacatgcacggagggaagaggatatgaagagacacagggagaaggcagccatctgacacaagccgaggagaggggcctggaacagatccttccctcacagcctctggaggagccagcttgggatcttgatgttggacttctggcatccaggactgtgcgagaatacattgctattgcttaagccactcagtttatggtgtcacagtggccctagcaaaccaacacagattttgggactggtacctgtgcatttggccttttttggaaataggtccattgcacatgtaaataaaatgtatgttaagataaggtcattctggaataggatgggtccttataaaaagagaagaggccgggtgtggtggctcatgcctgtaatcccagtactttgggaagctgaggtgggtggatcactagagcccaggagttcaagtccaacctgggtaacatagtgagaccttgtcttttttcttttttttttaatttttttaaatttttttttagacagagtcttcctctattgcccaggctggagtgcagtggcgtgatcttggctcactgcaacctctgcctcacgggttcaagtgattattttgcctcagcctcctcaatagctgggattacaggcacatgccaccacgccctgctaatttttctatttttagtagagatggtgttttgccatgttaaccaggctggtctcgaactcctgaccttaagttatccacccatctcgacctcctaaagtgctgggattataggtgtgagccaccgcacctggctgagacttcatctttaaaaaaaaaaaaaaaaaaattagccaagcatggtggcatgtgcctgtagtcccagccactcaaaaggctaaggtgggaggatcccttgagccagggaggcagaggctgcagtgagctgtgattgcaccactgcactccagcctgggtgacagaggaagatccagtctcaaaagaaaagaaagcaaaagaaaagaaatacttcccacgtatatgtcaactcctttctcccttgtctttctcagctgaagagagtggacagtgaaacactaattccaagcctcctttgaagctaggtgtgaccatgtgatgcagctttgagatgtaggcaatgagatatcagttgaaagccctgggaagctttcttttcctgaatataaaggcaaatgcttaagaggagaaggtttttgctctctgtcctttgccatgcctcatttttcacacctggaatatggatatgatggtttaaggtactgcagctattcagtgtcaggagaagaaaatgacaggctgggcgtggtggctcacgcctgtaatcccccacttggggaggccaaggcgggcagatctcctgaggtcaggaatttaagaccagcctggccaacatagcaaaaccccgtctctactaagaatacaaaaattagctgggtatggtggcgtgcacctgtgattccagctatgtgggaggctgaggcaggagaatcacttgaacccgggaggtggaggttgcagtgagccgagatcgaaattgcgccactacactccagcctaggggacagaatgagactccggagtccaaaaaaaaaaaaaaaaaaaaaagcagcagcagcagcagcagaagaaaactggatgctaaagagagggaaaggaggcagggcggggcgcagtggctcaggcctgtattcccagcactttgggaggccaaggagggtggaccacaaggtcaggagttcaagaccagcctggccaacatggtgaaaccccgtctctactcaaaatacaaaaattccctgggtgtggtggcgcgtacctgtaatcccagctactcaggaggctgaggccagagaatcgcttgaacccaggaggtggaggttgcagtgagccgagattgtgccactgcactccaacactccaacctggacaacaagagtgagactctgtttaaaaaaaaaaaaaaaaatggagagagatagagagagagggaaaggaaaagagaagggttccatcagcagctgcagcagtccttggttacctgctcctggattgcttgttacatgcttaagccattgttttttgtgtttcctgctgctcacggctagaagctattccaatggacatatgttagataaatcaatttgtagcaggttgaatgattgaaaccaagggatttaatcagagctggtttcataggggtgtgaccagtgcagtcacacagggccccacattcagaagggcatatgcttgacttaaacctccactgtctccactttgcctgcattttcattttgcactgggccctataaattatgtagccagccagtcctgggtttaatgaatcagtaggatcctaaatgaaattggtaaatgatcaataagctctgtcctcaaagttgaccattcgacatttttattaaagtcacagaagaggacatagaagacactatcagatttgtaagtagcacaaaatttgataaatggccagttagttagatgacacatttaatatttttttaaaaatctgaatagtcaggaaactcaaatctaaaagaagacatctaacaagagataaatgagaacccctgtatttggatttattgttttttcaaacacaagggcagaacagttcatgtggaaggagctttgttgtagggtcagggggttggggtcttgcaattgcaacactatgtgtctcaagtaaatcactccttctttgggtcacaatgccttcatttgcatgctaaggggtttaggtgggtgatataggatcagtcgcacgattctaagtgagcgattgccctggatttgaaaatcttgccatatagtgatacttggtaataatatttcatgtaggaaggagtcatgtatatatcgtcttaaaacttggagctggttggtatcaggtgagtgggttaggattgataccccccggccttttaccctagtgacacacacacacacacacacacacacacgtacaatattaatgtgcatataatagttataactgaagatatcatatatatgatttataagtcattttatttttatcacattttattatagtcacccagaatatacattatcaaataaaggtttgtatataatacactcctaatgagaaaaactcatgtaatattaccctaacatttattgtttaaaattgatgtaatatttttctaacattcaaaaacctgttggaatttgggttgtctttttgcccatttgtggacatcagaaattgccttgtgtgttacaattgctaatgatgttaatactacttgtggagcataccaggactgggaaagattggttgtacaaaaatacaaggaaaacattcatcattcatttttttctcatcatcatactccccaaccccacaagaaatcaagcctcaattgtcatggaattattggctagtgaccagcaataaaagagtgaaacaattaaatagaatccagtgcccccaggcttgtgctattaacatcaaaagagaacttggctgggtgtggtggctcacgcctgtaatcccagcactttgggaggctgaggcagggggatcacctgaggtcaggagttcgagaccagcctggccaacatggtgaaactccatctctaccaaaaatacaaaaattagctgggcatggtggtatgcgcttgtaattccagctactagggaggctaaagcaggagaattgcttgaccccaggaggtggaggttgcagtgagctgtgattgtgccactgcactccagcctgggagacagagggaaactgtgtctcaaaacaaaataaaacaaaaccagaactcacctccttttcttattgcaacaattaaatgagatgattcaagcaaagtgctgggtgcaaggtaagccctcagtaaatgaattcttataatcatgcctccacctcatgggcaaaactaccagctaaatccttttcagtgtcaaagaaatgaaattcaaggaaactaaatcaattagagccagacaggaggctacccgtctttgaaccgaaacaagaggaacaaggccagggtgggaaagaaggccaggggtgtaaacttcgtttccatttacactagagttacctacaaaatgaaattctcccaatgtcaaaacaacagtgaggtggtggcgccacctgctggtcactaagacacagttctgtggcaactgaggcttgatctcttagtggttgtgaggaggagaaaatgaatgatgaatgatttccttgtatttttgtacaaccaatctttccaggcccttttgtgctcagcaggtagtaataacattgttagcaattttaacacacaaagcaatttccgatgtccacaaacgggtaattttgcacttagatgatactagggaaaacacacaagccttgttttcgtaggacagcctggtcgaaagaaaatggattttgtagttcatcccaagttctaattccagcgcagccacttgccgggtggtcttgggtgaattacttaaccacccttagcctttttttctctgctgtagagtgactaacagagccttcgaacagggtctgggtagacttgggggcggtggagagtatctcgaagactttccaaaggcttcgaaagcacatgggtggttttaagagaagcagtgtgcagattcccaacctccactttctccctgatacggtttggaactgtgatctcacccaaatctcctgtcgaatggtaatccccagtgttgaaggtgggcctggtgggaggcgatgggatcttgggggtggatttctcatcagtggcttagctccatccccttggtgctgttctcctgacggtgagtgtgtccttgcgagacctggtcgtttaaaagtgtgtggcgcatcctccttcgctttctgtcttgcttctgccatgtaagacgagcctgctccccctttgcatccactatgagtaaaagtttcctgaggcctccccagaagcagaagctgccatgcttcctgtacggcctgcagaactgtgggccacttaagcctcttctctttttttttgagacagagttgcactctgtcgcccaggctggagtgcagtggcaagatcttggctcaccacaacccccccttcctgggttcaagagattctcctgcctcagcctcttgagtagctaagattacaggcgtgcgccatgatgccctgctaatttttttttctttttttgagacagagtcttgctctatcgcccaggctagagtgcagtggtgtgatctcggctcactgaaacctctgcctcccaggttcgagcaattctcctgcctcagcctcccaagtagctgggattacaggcacccgccattgcgcctggctaatttttgtatttttagtagagacggggtttcaccatgttggccagactggtcttgaactcctgacctcaagcgatctgcccacctcggcctcccagagtgctgggattacaggtgtgagccaccgcgtcctgcctcgagctggtttttagacttcatgatccttcctcccctttactggaggaacgcatgccagtcacttgctctcagttttactaaagttcactttcttcccaggtaacccctggggactaaacaaaggcacaaatggaaatacctgtgcaggggatgaaaatgtgaatgactaataatagggtaacaagccctgatgagtcattttatttcccaagcattgttttaccccaaattgaaggaagacctaattgagtttcctactatttaaagtattgaaagttatttcactaaatgatttctgacatataatactgaaggaattcaaaggattgattaacgtcactgtaataagcctctttccagaccatctcttgatttacgacaggctggtttctcagagcatacatctttttaaaattattattaaataattatagattcactggaaattgcaaagatagacaggactgatgtacccttcacctagttttctgcaatgactaatcttatcaaaggagaatagcaaaaccaggaaattgacattggtatgacatatgtgtgtagttctgtgtcatttgcttacatgtgtagattcacataaggcatggtggctcatggctgtaatcccagcactttgggagcccaaggcaggcagatcgcccgaggtcaggagttcgaaatcagcccatggtgaaaccccgtctgtactaaaaatatgaatattaggtgggcatggtggtgtgcgcctgtaatccagctactcaggaggctgaggcaggagaatagcttgaacccaggaagtggaggttgcagtgacctgagatcacgccactgcactccagcctaggtgacagagcaagactccatctcaaaaaaaaaaagaagatatggaatgatttcatctaaaagatctccctcgtggtgcccctttattgccacacccaccccatgcccccaccatccctcacccctggcaactactgatttgtaatccatctctataatgttgtcatttcaaggacattataaaaatagaattatacatatatgcaacttttttttgagacagggtctcactctgttgcccaggctggagggcattggagcaatcttggctcactgcagcctccaactcctggcctcaagcaatcctcctccttcagcctcccaagtagctggaactacaggcacacgccaccacgcctggctaattattttattttttgtaaagatggggtcttactttgttgcccaggcttgtcttgaactcataggctcaagtagtctcctgccttggcctgccaaagtgctgggattatagccatgagccaccccaccacctgcaactttttgagattggcttttttcaaccttcataatgctcttgagatccatccaagttgttgcaggtatctatggttctttttttataatgctgagtagcttctcacagggcatacctctttatgtataaaaaatgaggataggctgggtgcagtgcctcacacctgtaatcccaggattttgggagaccgaagcgggcggatggcttgagatcaggagttcgagaccatcctggccaacatggtgaaaccctgtctctacaaaaaattaggcgtgatgtcatgtgactatagtcccaactacttgggaggctgaggtgagaggatcatttgagccaaggaagtcgagtctgcagtgagccgagatcatgccactgcactccagcctgggtgacaaagtgagaccctgaagaaaaaaaaaaagaaataaataaagaaagaaagagagagatggacagagagaaagaaagaaagaaagacagaaagaaagaaagaagaaagagagagagagggagggagggaggaagggaaaagaaaggaaaagaaagaaaagaaagaaggaaagaaagacaagaaaataaagaaaaaaaactaaggagtgctgggattacaggcattagccaccttgccaggcccacaatcttttatcttaacctgaacattccctttatttatttatttatttatttatttttcatttttttgagacggattctcgctcttgtcacccaggctggagtgcaatggtgcgatctcagctcactgcaaactccacctcccagattcaagagattctcctgtgtcagcctcccgagtagctgggattacaggcgaccgcgaccacgcccagcaaatttttgcttttttagtagagacggggttttgccatgttggccaggctggtctcgaactcctggcctcaggtgatctgcccaattctgcctcccaaagtgctaggatcacaggcacaagccaccgcgcctggactgaaaattccctttctagcaatcccaggtctttagacaaactcaaccaattgtcaaccagaaaatgcttaaattcacctggaggcgcccccccacttcatcccctgctttgagttgtccctcttttctgggccagaccaatgaattcaatgaatttcttaaatgtatttgattgatgtctcatgtctctctaaaatgtataaaaccaagctatgccccaaccatcttggtcacatgttctgaggacctcctgagggctgtgtcacaggccacggtcactcatatttggctcaaaataaatctcttcaaatattttacagagttcgactcttttcctcgacaatagtaaacactgtaatatatttttgttgttttaatcaattgtatactactgattataattataaattcattcaaattaaaggatcttataattttataatcaaaggaaattgaaaatatttaaatatacatatataatataaatgaatatttggccaggtgtggtggctcgtgcctgtaatcccagcactttgggggacagattacctgatataagtcatgaatcctggtctttatttaaggtatgttttttggatgaattcatgtaggtagagtgcttagaataataactagtaaaaagcaggtacgtgttagctgatgtcttaggacagcttctccagaagcagaggctgagagagggattcttgttccagtgacttactgcaggaggatcttgggaggagggggtgagggagcaggctgggcaggggagtgagttaactgaggaaggctgtggttttagctggagactgacttcaggctgaccccagggggagcctgcactgcagaggggttccacttcgaggcaagggagccggccttttgcaagctgtgagctgcagctgacacttgctgcccaagtgactaaggcatcaacagcatctgctacagctcatataattttttactggggatgtggaaacgaagagaaataaggaagagttcctgtattccatgtagaaagcttattttcacttgggcataaaaggagcaaatgatgcaattacagactattcgcctatggagtgctgctgaccatcaagacagaaaggctcagagagaagagggcccaccaggccagctcaagggcctggagaaggtgctggaaaaaattactcttggtcccgagaccagctcggtcagggagaccctaacccagcggcactagaggaattaaagacacacacacagaaatatagaggtgtgaagtgggaaatcaggggtctcacagcctccagagctgagagccccgaacagagatttacccacgtatttattaacagcaaagcagtcattagcattgtttctatagatattaaattaactaaaattttctaaattttaactaaaattaactaactaaattaactaaaagtttctatagatattaaattaactaaaagtatcccttatgagaaacgaagggatgggccgaattaaaggaatagaatagaattaaaggatagaatagaattaaaggaatagaatagaagggatgggccgaattaaagggctagttaactgcagcaggaggatgcccttaaggcataaatcgctcatgctattgtttgtggcttaagaatgcctttaagaggttttcctgccctgggtgggccaggtgtcccttgccctcattcccgtaagcccacaaccttccagcttgggcattagggccattacgaacgtgtcacagtgctgcagaggttttgtttgtggccagtcttggggccagtttatggctggattttggggggcttgctcccaacaacttggaatggcacttgaagggttccaggagctttggatgattggcaggggagaagggggaaggtagggtgggtgcggggtaaataagagaggcaaagagcatcagatggaatcaactctgcctgggagcttgcccttagtggctggacctgacaggagagggacaggggaccgaggaggggcccatgtgtatacagagactgcagtgagtacaaaggagggtcaacagacaggcagaggggaacatttgacactgtcaccttgaactccctgacaagatcctttgagatacttttttgtttgtttgtttgtttagacagcctcactctatcgcccaggctggagtgcagtggtgtgatctcgtctcactgcaacctccgtctcccaggttcaagtgattttcctgcctcggcctcctgagtagatggaattacaggcatgcaccatcactcccagctaatttttgtatttttagtagagacggggtttcaccatgttggcctggctagtcttgaactcctgacctcaggtgatccacctgcctctgcctcccaaggtgctgggattacaggcgtgagccactgtgcccagcctgagacacatctgttattgctatgtcacagactagaacattgaggcacagagaggttaacttattgctcaaggtttcacagccgataagcagtggagcagagaataattcaggccagccggctctagggttgcactctgagcccccatcttgtactggtaccaccttagagtgtggcaggggcaatggaagagcagcatggcccaggcatgggggctctgagctgtgggcaatggtgtcaggtgagcgtgaggccaagtgggccaagccagtcctgatacacagggcagagccccagctcctacctttacccaacatcaggcaggcattgccaaaacttcagctaagccttcttcagctctgctgcagctcaagggatgaaaagctagattaggcaactgggctggcaaggtgaggacaagaggaaggaaagggagaaggaagcccagaaggttggagctgggaagcagggagaaacctggggcctgggagggcaaaagaatgaagggcttcaaaggggtggtgagatcagatgacatcgctgaaaccatgtgatgtggtttggctgtgtccccacccaaaatctcaacttgaattataatctgaattataatccccatgtgttgggggaaggacctggtgggaagtgattggatcataagggcggttgcctcatgctgttcttgtggcagcgagttctcgtgcgatgtgctggttttataagagaccttccccacttcactctgcacttccctctcctgctgccatgtgaagaaggacgtgtttgcttccccttcctctatgattgtaagtttcctgaggcttccccagcaatgcagaactgtgagtcaattaagcctctttcctttatacattacccagtctcaggcagttgtttaaagcagcgtgagaatgaactaatacgctgtggaaaccaagtgaaatgatttgagctcccaaggagagatggcagcagggatagccaaaccctggggcagtgcccactctgaagacagagccctggctgtgcctccctatgggaagcagctagggaggttttgttttaattttttttttactgtggtaagatacacacaacataaaatttacaaatttaactatttttaagggtacaaagtatcattaaataccttcacattgttgttcagccatcaccacaacccatctccagaactttccatcatcctaagctaaaactctgtacccatttaacaataacccaacattttcgtgctcctccagctcccagaaacctttattctactttctgtgtctataaatttgcctcctctaagtgccttatgtaagtggaatcataaagtatttgcccttctgtgacaggcttatgtcacttagcataatgtccgcaaggtccatctatgttgcagcatgtgtcagattataattttttttggctgagtatgctagctcacacatataatcccagcactctgggaggccaaggcaggaggatcacttgaggccaggagttcgagaccagcctggccaacatggtgaaaccctgtctctactaaaaatacaaaaatgggctgggtgtggtcgcaggtgcctgtaaccccagctactcgggaggctgaggcaggagaatcgcttgaacctgggaggcagaggttgcagtgagccgagatcatgccattgcactccagcctgggcaacagagtgagactgtctcaaaaaaaaaaaaaaaaataggagagaatgagagagagagaaggagaactagcagaggtgaggtgaggtccttgcttagttaactctcccctgcctcgttccccttcttttgtgagcccctccttggtaaagcctttacaagggatttggaggtgtaggtaggataaaaaggcaccaccagagcccttctcagtgacattggaccccagggcacaagcaccccacccacaccccacaagcctgcccctctgaggacacggtaatttggcacagtagcactttcgtaggtattggcctttctaagttaacaatacagatgacagcccacgatacagatgacagcccacaatacagatgacagcccacaatacagatgacagcccactttaaccaggacttgctggagggttggggctgtctcctaagccgctgggcataagggctttgagcttctgtgaagcgtgaatcactgagtgtgagtcgctgagctgattattctccgtgccctccttatgctttcttcctccttcccagccctgctctgcaccctgtgggcttgacctctgtggacacattttctgagtttctttcccctttgtcttcctgtgggtttggctaatgagaggccctgagaagaagtcggagggcaagagaagcagctggggtctttcttccccgtccctccctacttcttgtagtgatgctgcctgtggcttggggctcttcctccccagatccggctctcacccagctcagtcacgctctctcctcccctgacctctactacagtgagtggtgccgaggggcttcaccgtcccactttgtaaaaattagccccgcacgctagtttgtaaacaaacgctctgttgaattctttccagaattccatttgagtgtgcctaagggtgccctgcttgagctatgatgctacagatatccccatgagaaatttctatccgtgggcaagggcagcaaggggtcacgggatcgtggtgtgatttctctgccttaaattagttcctaatatgttgtaatattgttgatgtcagtaagatccaggatggggccgggcacagtggctgacgcctgtaattgcagcactttgggaggccgaggtgggcggatcacctaaggtcaggagttcgagaccagcctggacaacatggtgaaaccctgtctctactaaatatacaaaaattagctgggcgtggtggcaggtgcctgtaataccagctaccctggaggatgaggcaggagagtccctggaacccgggaggcgggggttgcagtgagctgagatcgcaccactgcactccagcctgggtgacagagcaagactccatctcaaaaaaaaaaaaataataataataataaaaaaataaaaggtccaggatggaaaatggagactgaggatttgagaggggtctggttctgtgtgcactcattcttctctccatctgctgagcatatcaggaagatggactcacaggaggatgttgagcgtggagtagaaatccattattaacctgacaaactcatccaatccaggagcaatggtggaatcaatctttttatttgttgttgagagttcctgactcggtgccaccactactggaatgcttgtgatccacaaagcccccgacaagatcagcaaacgtttcatgcctgatgggcttggcattctgtcaggctgtagctggtaattgcaaatagactatagatttcctcctacatttttgttttttaaaaggatcaagtggccgggtacggtggctcacacctgtaatcccagcactttgggaggccaaggcggacagatcacttgagcccaggagcttgagaccagcttggccaacatggcaaaaccttgcctctactaaaaatacaaaaattagccaggctcggtggcacacatctgtaatcccaggtactcaggaggctgaggcaggagaatcacttgaacctgggaggcagaggttggagtgagctgagagattgcaccactgcactccagcctgggcaacagagtgagaccctgtcaaagaaaagaaatgaagaaaagaaaagaaaagaaaaaagagaagagaagagaagaaaagaaaagagaagagaagaaaagaaaagaaagggaggggaggggagggaagggcaggggaatagggaggggaaggggaggggaatagggaggggaaggggaaggggggaaggggaaagggaaggggaggggaaggggaggggaaggggaggggaaggggaggggaaggggaaagggaaggggaggtgggggcaagtttctttaatagtctttttctctgctcttagagatgaacagattgctgtttctgtgtgttgtttttcagttgagcatcagctgaaggaattgcttgggtatacagggcctcgttgtatcaatagtatgtccttaaaatagaatcaactcacaaagtgagatgctcacaccatgagagagatctacagactcacagcatgtgaaccccagaagatttggggttttgcagcagccacctccactcgggtgactccatggaggatggtcccaggaaccccttccctgggagggttccctggcctctgaagcctggcaggagctccttctaggagaggttctgctctgcagcccagaggctgcatctgctataaggaagtgcttaacaggccaggcacagtggctcatgcctgtaatcccaacactttgggaggcagaggtgggcagatcacctgaggtcaggagtttgagaccagcctggccaacatggtgaaaccccatctctaataaaaatacaacaattagccggtcgtggtggtgggcgcctgtagtcccagttacttgggaggctgaggtaggagaatcacttgaacctggcaggcagaggttccagtgagccaagatcgtgccactgcactccaccctgggcgacagagtgagactccagctcaaaaaaaaaaaaaaaaaaaaaaaaaaaagaagtgctcagcagacatcgtgccctttgccctttggctaatcatgttttaaaaatacctttttcttttttgttttaaaaaaagaagaagaagaggaattctccttggggacctggtctgcaaactccacttctgttcccacttctaaaggcacagctgttgtccatggagagttccaaagatgtgtcttgatgacaataatggaaagtagttggtgtttttcttccttcatttggatttcagttttgtatactaaacagaagtaattgcatttgatgacaaaggaaaaagaatgaaatcagcaaagggatcatttggggttttttggctcagtgattcctgtggcagccgttgtggtggttaattttctgtgtctatttgcctaggccatggtacccagttgtttggtcaggtaccggtccagatgttgtaaaggtataggtatattttttttcttgagatagagtctcactctgtcgcccaggctggagtgcagtggtgcaatcttggctcactacaacctctgcctcctgggttctgcctcctgggttccagtgattcttgtgcctcaggctcccaagtagctgggactacaggtatgtgccaccaagcccggctaattttttttgtattttaagtagagacggagtttcaccatgttggccagactggtctcgaactcctggactcaagtgatctgtccaccttggcctcccgaagtcctgggattataggggtgagccaccgtgcctggcctgtaaaggtatttttaaaacgtgattagcaggatgtggtggttcacacctgtaatcccagcactttagaaggccgaggcaggaggttggcttgaggccaggaatttgataccaacctggcaagatggtgagtctctacaaaaaaatacaaaaattacccagctgtggtggtgtgtgcctgtggccccagttacttgggaagctgacgtgggagtatggcttgaacccaggagttcgaggctgcagtgagccatgtttgtgctactgcatgccaggctgggcgacagagtgagaccctgactcacaaaaaatgtgattaatatttcaatatatgtagtatactctgagtaaagaaaattaccctccataatgtgggtatgcggtatctatcagttgaacaccttaagagaaaagactgatgtcccctgaagaggagggaattctgtctccagcctaccttgggactgaaggctgcaatatcaactttttcctggcctgcactgcagatttaggacttgcagcccctacaattttttctttttatttttttttgagacggagtcctgctctgtcgcccaggctggagtgcagtggcacgatcttggctcactgcaacctctgcctcccaggttcaagcgattctcctgcctcagcctcccaagtagctgggattacacgtgccctccatcacatccggctaattttgtatttttagtagagacggggtttcaccatattgactaggccagtcttgaactcctgacctcaggtgatcccgcccacctcggcctcccaaagtgctgggactacaggcgtgagcctgcagcccatacaattacatgagccagttcctcaaaacaatctctctctgtctcacacacacgcacccgccacacatgtacacacacacgcctgcatgtacacatgtacacacaactatttctgtagagaactctacctagaacagccattttgccggctgaaaacagcagtctgctttctcaggaacttagttattactattatttgagacagggtctcactctgtcacccaggctggagtgcagtgatgtgatcatagctcactgcagcctctacctcctgggctcaagtgatcctcccatctcatcctcccaagtaactgagaccaaaggtacacgttaccacacccagctaatttttaaatttttttgtagagacagggtcttgctatggtgccaggctggtcttgaactcctgggctcaagtgatcatcctgccttggtctcccaaaatgctgggattatagttgtgagccactttgcccgaccaggaacttacttttaaagaatacatgcctgtaaggctggaatttagtattgccaaaattactcttatgaatctttggttctcaataaggtctggtgtatggagccatctttacacaatatgttgttgggtggcatgtcaacccaaaaatagtccttttctccgctcttagagatgaacatattgctgtttctgtgtgtttgttttcagttgagcatcagttgaaggaattgcttggttatgtagggccttgttgtatcaaaaatacgtacttacaatagcagaatcaactcacaaggtgagatgctcacaccatgagtggtatctacagactgacagtgtgtgaaggaattttggattcaaatctctagtcttcctcctactacagggtataaaattgttgataggaagagcagacaaaatctcttttatgatgtaaactcatattctctccctctctctgcctctgccctcaacatgcatatatatagttgatttaagttatatgtaaatgtaagctgggtgcaactctcctgtccagtaagaatgagggcctggcctactgtcagatttcactaaacacatttctggacagtggtgtgcattaagaggtctcttcataaccctccccaaacgagtcttcagtcatttgagtttgcatagcaatgtgaaagagaccactctcttcctttttttttttttttttttttttttgagatggagttttgctctggttgcccaggccggagtgcaatggtacgatcttggctcactgcaacctccgcctcccacgttcaagcacttctcctgcctcagcctcccaagtagctgagattacagatgcccaccaccacacttggctactttttgtatttttagtagagatggggtttcaccatgttgaccaggctggtcttgaactcctgacctcaagtgaggaggcctcagcctcccaaagtgctgggattataggtgtgagccaccatgcctggccctcagacatcaaatttaactcttgtgaatattatttattatatgacactgtggtagcagctgctaagatggccctcagtgatccttgcctccttgtgtgaaaaaggggtttatgcctcagtgtgtccccccccagtattggctgaccattgtggtgaatagaattctgggaaaatgatagtgtggggctgatatggttcagctctgtgtccccacccaaatctcatctcaaattgtaatccccatatgtcaagggagtgactggatgggaggtgattgcatcatgggggcaggttccctcatcctgttgtcatgatagtgagtggcttctcatgagatctgatgcttttagaagtgtttggcagttcctccttcactatttctcttttcctgccaccttgtgaagaaaatacttgtttctcctttgccttccaccatgattgtaagtttcctgaggcctccccagccatgcagccatgcaacctctttcctttataaattacccagtctcaagtatttctttatagcagtgtgaaaatggactaatacagacagtggcttccagggctaagtcatcaaagacattgtggcttccgtcttgctctcttggattactcattctgagggaagccagctgccatgttgcaaggccactcagtgcaccttctgagaggctcatgcagagaggacctgaggcctcccatcaacagccagcaccaaaataccagccacgtggggggaccatcctggaagtgcatgctgcagccccagtccaaccttcaaatgactgcagcccacttcagccaatatctgactacaactttatgagagaatttgaaacggaattgcccagccaacccatgcttgacattctgagccactgaaatcatgacagagaacaagtgatgattgttattataaatcactataaatggagtaatttgttagcagcaataactaatatagaaacattatcttttttaattatttatttatttatttatgttattttattttttgagactgagtcttgctctgtcatccaggctgtagtgcagtggtgcaatcttggctcactgcaacctccgcctcctgggtccaaatgattctcctgcctcaacctcctaactggctgagattacaggtgcccaccaccacacctgactaattttttttgtatttttagtagagacggtgtttcaccatgttggccaggttagtctcgaactccaggctggagtgcagtcgtacaatcatagctcactgccgcctccaccacctaagctcaagcaatcctccagcctcagcctcccaagtatctgggatagcagatgcacaccaccatgcccagctaatttgatgtgagtttgactactttagttaccacatgtaagtgcaatcatgcagtatttgtccttttgtgactggcttatgtcactaagcataatgtcctcaagcttcatccatattgtagtgaaacggcgttatttgtctggggtaaatatccaaggtttgttgtttcatgaccatggaaaactaagatgcagacatacaagaatgaggttcagagtggaagattaataggtgaaagagaagagctcgctgcagcagagaggcgtcccaaaaaaatggattgctgcttctgcgaatgtaaggggttttataaatgagcttgaggaggcgctgtctgatttacatagggcatgaaagattggttggaccaggtgtgccctttgcatagggtgcaaaaacctggctgcccccaccctaatcttttattatgcagatatgttctctggcctgcgccatgttgcctgtttctttactgtacacgtggtgacaaagaaaagggaagatggagcctccatgttgaacatacctggcccccaggtagcccttttctattggcacagctgccggcattcacctgtgcaagcttccagcttgcttatctatgtctgcagcttgatttttcaggctgctccttgttagaaatgatttgggggctgcttttgttaaaagggaaattccgctgatgactgttttatgttttacccactatctgcctaaataatttcttttttttttttttttgagacggagtctggttctgttgccagcctggagtgcagtggcgcaatcctggctcactgcaacctccacctcccaggttcaagcgattctcctgcctcagcctcccaagtagctgggactactacgtggcacgcgccaccacgtccagctagtatttgtatttttagtaaagacagggttccaccatgttggccatgatggtcttgatctcctgaccttgtaatccacctgcctcagcctcccaaagtgctgggattacaggcatgagccaccacgcccggcccagttcttcgggttttttttttagacagggtctcactctgttgcccaggctggagtgcagtgatgtgatctcagctcattgcaacttctgcctcccaggttcaagtgattttcttgcttcagccctccagatacaggcacccgccaccatgcctggtcaatttttgtgtttttggtagagacagggtttcaccatgttggccaggctagtcttgaactccttacctcaggtgatcctcccaccttggcctcccaaagtgctgggattaaaggtgtgagccactgcgcccggctccgttcctctacatttgttagtgagcattttactttccctgatagtgaaagatctttcctttttcttcctatttgttctttggtgtcactctgattcatggattcttgttttaatcaaatgtaatattataccgatagtcattctgatgaactttgggttttttttttttaacctaacaatatattctggatatcactctgtgtcagttcatagagatcttcattgttgctttttacagtgacatggtattccattatgtagacataccataatttattcaaacaatttcttacatatggacattgaggttgtttttaatattttgcaattacaaattatgcttgaataaatagccttgtacacaagcacatatatatgtataaaaatatatatgtaggccaggtgtggtggctcacacctgtaatcccagcattttgggaggtcaagatgggcagataatgaggtcaggagatcgagaccatcctggttaacacattgaaaccccatttctactaaaaatacaaaaaattggccgggcgtggtggctcacacctgtaatcccagcactttgggaggctgaggcaggtggatcacaaggtcaggagatcaagaccagcctggctaacacggtgaaacctgtctctactaaaaatacaaaaaattagctggacctggtggcacgtgcctgtagtcccagctactcgggaggctgaggcaggagaatcacttgaacctggggggcagaagttgcagtgagccaagattgcaccactgcaatccagcctgggcaacaaagcaagactccatctcaaaggaaaaaaaaaaaaaaaaaatatatatatatatatatatatatatatatatatatatatatatatatatataaaattgttagaggtcattcaggaattcaggataagtacccagaagtaagatttccgcatcagagggtaaatgctgtgtaattttgttgactattactcagttcccctcaacgggatcgcactattgtgtgaatcccacagcctcatccacagcctcaccgcatagtggtttgtaaagattttgagtttttgccattctgatgggcaataggtgcattgcaatttaaatttctgtttatattattatgtaactagagcttgcattcacccaccatgtgagtggttcctaagactttaattttgagaaatggcttctactcaggctccaggtccttattcttcagccccgacccctctttcctccctgtagacacttccttccatctaaaccgccacggcagcctccttcagcacacagataacatcctcctcactgagtgggcaggaaaggaggttcaaagaatgaagtggtttacccagccagtaaatggagaatccaagactagagaccatctgttcatttttgtttgtttgcatttttttcctttcttttctttattctttctttctttttcatttcctttcttccttccttttcttccttcctctttctttttttctttcttctttctcttctttctctttcttttcttgctctctttcttctttcttgttgttgtttttgttgagatcatgtgctcagattcctagtacatgactataaagttaggaaagagcccccaagaccactttcccctctgataccaatttaaagtttaggggtccccacaaccaccttcaagttcaataatccacttggtggactcgcagaacgtactgaaagctattatacttatacttacagtttatcatagcaaaaggacacagattaacatcagccaagggaagacacacatagggcagtgtccaggagagcttccagcagtcctctcccagtggagtaatggactccttctggaaactatatgcacggactatatacatggagtattgccaaccaaggaaactcaccaggctgttggtgtccagagtgtatagtagggcttggtcttgtggacatggctggcttgaccttagtctattccttcaggggtcaagctgatatggtgtggccaaatctcccaccataaatcacattggtctaacatgttgtgtctgtttggcatggcccatggcctccaggtaaacacagtgctattatcaagcaggacatctaagggcttagagatcacctcccaagagccaagggcaaagcccagatctcacttcaagtaagcttaaaattctttactacacaacaccctttccttgttacaggagagtgggggtgccctgctggccctcacagaggaagagctcataactcataacccacaaaactgtaatgaagggcaatcccatccgactgaaaaatgggactggaaacaggcactgaacattccagaaggaaagagaggggcacaggggagcgcgtaagtggatttaatgatggctagtctacaagaaaaagtgcaatcgattcaggttattgaaaattcacccccaatattttcctctactcatcaaacgtggaagaaaggggctcattggagcttgctcatggctcgcatcagggccagccggcctgtcttgttctctgattataacatcaaggacccctaggtggtgctgatttctagcttgggtggcaaatagttaacaacaacaaaaaaggaatctgaaagttcagcaaacctcttctttttttttcaaacttttttgtttttgattaagcacattccacagtacaaagctgtcatgaataatatctgtacaattgaacagtttcaatagctgttcagacacaaatttatttcaaacaaataattggcaaacataattaactacaagttagaattagactatcccagtgctttaaaacattaatatagcagtaatttacatttgctcaattatggttagcaaaataaagtccagagtatggctgggaatttactattataatcccagaaagtcagaattccttgggtgccaaagtcccttgctataatttagtaggaacaattcaaaggttgtgtacatattcaaaggccatgatctcccaaggaacaagggggacttctatattaaacaagcaaaaacaacaaaaaatctattcattcattccgaattgtctcctcctctgcccctaccttccccctgggctttcctgagcagtttgatattgaagttgtaggacgaaaagaggtcaaaactaaatcactttcacaaccaccatcaagcttacaacatctgccttatgaatggaggtttattgtttacgctttgagactcaacttctcaaaaacataaattagtaacatgggaaggaaggattttttttaagaaaaactaaaaaagcaaagccaactcgataaatcacatacacacacattgatccccacaccgttctcaatgcaaaggacaaatcggagcccaaggaccttccctttagtagtagagcatgcttccacaggaagaggtttaatttataggaggctgtttattggtcctttaaaatgctattgatggccgggcacggtggctcccaaagtaatcccagcactttgggagcctgaggcaggcggatcacaaggtctggagttcgagaccagttcggtcaatatagtgaaaccccgtctctattaaaaatgcaaaaattagctgggtgtggtggcacgtgcctgtagtcccagctacttgggaggctgaggcaggagaatcacttgaacctggaggtgaggaggttgcagcgatctgagattgcgccactgcactccagcccgggctacaatgcgagactctgtctcaaaaaaaaaaaaaagttattgacattccttgatctttggaaacaacggcaaagggcaaatcaaacctaatattgaataagggagaaggagtgccaactggatgccaatgtcctttccatgcactgtcagggtgatagtgccagatgccaacgtcctttccatgcaccatcagggagacagtgccatttacacatttgggctgtgtactcgggagtactcgggagctttgagaacctgctgaggccgcagcagcacgtgacaccagagatgactggggtgggattcatggacttgaggctttacaccacttaggagtgccctcccctcagcatggacctctgaaccagcctgacctgacctgcaggctccaacacaccagcgggccctgccagaaccttggcaaggacaggatgcatgaattccagagccaggacagcccgtcaatagggccttattatttccccttcccagggccacaactgcacagaataatgatttttgacagtgaagccaaatgaatactacgggaagtgaccactagtactcaggagtacttatgagaaaaagaataagaacaaaaatgtttaagttacctctctattgtataatatatactgtacaacaaataaaacattcatgttcaactttagaaattacattttaaaacaagattctccttaaaaacacacacaaaccacacacacaatgacaacaaaataaaaacactgtaggaatactgcaggaagggttccaggtaatccacatcaaccctggtatcaggttcttgagtccagtccatggctaagcgcgaacacactctgtattagtgtctcaagtgcagggggccctgaccccagcaactttgaagttaaactgttatgtacattatatctacatgtgaatacagtattttaaattaggaggcaagcacacatataaaggtgttactctaccaaatatcaggagatggttgcggttcagagaacagttaataaaagggctaacccccatggcacgtgtatacctatgtaacaaaagtgcacgttctgcacatgtattccagaacttaaaatataatttaaaaaaattaaaaataaaataaaagagctatgttgggagataataactgacttatagttcttttttttttttttttttttttgagacggagtctcgctctgtcgcccaggctggagtgcagtggtgcaatcttgactcactgcaacctccgcctccagggttctggccattctcctgcctcagcctcccaagtagctgggactagaggcgcccaccaccacacccggctaattttttgtatttttagtagagacggggtttcaccgtgttagccaggatggtctcaatctcctgacctcgtgatccgcccgccttggctttccaaagtgctgggattacaggggtgagccactgcgctcggccaactgacttacagttctttaaattaaaagaaattggtatagaaaggaagtataatccaaaacatattactaaaacgacccagagagatttttccattgtccaacatgttcctaatacagcaagtcaaaattcataatgacttggacggtcaaaaggagaatgttaacttttgaaaatgaaagccgtggacattctgagtaggtgtttggcacccaaaatttcactgaagaagaatgctgtttcttagtatcaaaccaaagtgcaaagcaatataaattagaggccaagacttctcttggcgtcaatttacttctgtaaaacagattctatgttccttttctatgatcagtttacatttgaaacattagattttttcactaatgagggaaggaaatgggcttctgtgctactttcaagtcagtgaagctaaggtctccttctcaaagtagagctggaatcagaggtgagaaatgtcgggacttgaagagttaggctgctttgcatctacccagcgtctagaaccaattccagcttcataactcagctgtgaacgaactcccttaggcattggtagccacgtagccagtagttcaagactagaaaacccggaaacgggtgaaagtgcagactgttatctagagatgtaagtgtatgttctggagggggaatgggtctcattctgggcactgggaggcacatttaagaaaccacaaatcaaaatagtgtcatcatgggagctgctgacgatttgaaactcatcaaactgtaggcaaaacacatgtccagaatgttccaccaatgtgcgcaaacacaatgtgcttgctggggctcgagggtcaagagcggcttgcaagtcctaaactttaattttcccatcataggcccggctgaccatcctcttgttatcaaactggatgcatcggaccaattcttcatgtccctctaggactcttaaacaggagccacattcaatatccaagagcctaatggtatgatctgatgatccactaacaaccagcccatccctgtactggagacaagactcgcttgtgcccattgagagtacgagcaaattcacaggtgctcatgctccagactttgatggtcctgtcaccagaggcagacacgatgtatttctcgtcaaagtctactacgttgacagcagctcagtggacaaccaggacaccacgtaaagtgatatcggtcgcagaagccatgtcccacacagcaatggagcggtccttggaacaggtcaccatcagtccactgctgaagcgtaagtgcagtacatcctcattgtggtggattaatgtgttaagaacttcacccgtgttcacttcccacactctcaccgtagaatccgaagagccagttacaatgacacgctcatcctactgcagatagaggacagaacctgtgtggccattaacactttcaaacattccaggctggttttatcccaaatcttaattatcttgtaggccactgataattttttcatcatcgtactgtaaaccatagacacctttactattttcagagtggtactgaatcctctgcaagctgtgtcggccacaccgctaggtggattctatagtctctatatcctggataatgtttgggtataatgacctataaaatgaatttggagggctagatatgggtctgttttgaaacaggtactgatcccaccctcttctttctgaaagtcctttccataggggatcagtgtgtaccattcgttcaatcagcttcttccaaagcattcattctgagatcaatccctgccatcctttacataccagctctgctgcacacagagacctggtaaccaggtacaaaagaatgttttctgctatgtgatctaagccttgctcgggtaaagcagtaataaagtcctgctgcaacatgggcttcaggtaagagttgatacgtccatggtgataatgacacattcgtgaaataagatgttccacaaattccaactgatctgattcagacccctggttaaaatattgaatatacaagtctttttctttttggtagtttccttctgatggcctctttctggagatgatcacaaatgatgttccattacttatctgccaaggagtatttttctttggggacttatcttcatcttgatcttccagaactgaagtgttagttccacatggctggggaggcctcataatcacggcagaaggcaaggaggagcaggtcacatcttacgtgcaatggcagcaagcaaagagagagaagcttgtgcagggaaactccccttttttaaaaacatccgatctcaaccaggtgcggtggctcatgcctgtaatcccagcactttgggaggccgaggtgggtggatcacctgaggtcaggagtttgagaccagcctgaccaatggagaaaccccatctctactaaaaatacaaaattagccgggcatggtggtacatacctgtaatcccagcaacttgggaggctgaggcaggagaatcgcttgaacttgggagatagaggttgcagtgagccaagattgtgccactgcactccagcctgggtgacagagtgagactccatctcaaaaaaaaaaaaaaaaattacaaaagtaatacatattcacaattaagaaaaacaattaaatagaaaaaagagcaaaaatgattacctgggcatggtggcaggcgcctgtaatcccagctacttgggaggctgaggtagaaaaattgcttgaacccaggaggtggaggttgcagtgagctgagactgcaccattgcactccagcctgggcaacaagagcgaaacttcatctcaaaagaagaagaagaagacaaagaacagagagcaaaaataaaatgtacaagtccttctccttcccataactccccctcgcaggcctgccttccgctagccatctcctggacttcctcaggcttgaccctggcatccagggtttctcccttactggcaggcaacacccacattccaggtgggcttctttggaagcagagttacttgccttgagttggaggggtggggtggaaaatcatcccttccccacaagctaaccacactcttcacagaaaggattgctctgatgtgcctatggatcctccctttccccttgacagcctgcaggaaaggaatgggttccaggtcagagaattggtcctgccacctcttagcaagttatgtggggttgcctttactcctcactttgaaatgtcagcggcttgtcacttgtcacttatattctcggtttgaggcttcagctgacatcctcagacaagagtctgttatggtctttcaaatctaggggtccgtagattgaccacctaagaccatatttgtcccagtggccatttcatagttggctcactctttctccagcatgaacgtgacatgatcaaaattatgactgcccttcataagggtcattctggctgccctaaagggactttgctagcatctctggcttccatgcctactcaattagaaactttccatctttgtccagttttaacagactgagatcttggccaagcctaaaatctgaggttctcacctatcatctccatgaatgaacaacaaatactacctactttgctgatttctatgactcaaatatcctttcattagcaaaatgcggaattacagaatggaagcagcttgcattttgttttgatatggacttattcatcaaatatttattagagttgactctgtgctggcactatgcctggactggaggtttaataatgaacaagacaggcaaggttaaatttgacgaaaggccagatgcggtgactcatgcctgtaatcctagcactttgagaggccaaggcgggtggatcgcttaagcccaggagctcgagacctgcctgggcaacatggcaagacctcgtctctacaaaaaatacaaaaattagctgggcatggtagtgtgcgcctgtagtcccagctacttggaagactgaggtgggaagttcctttaagtctgggaggcagtgagctgagaccatgccactgcactccagcctgggagacagagtgagaccttgtctcaaaaaacaaatggacaaaagatacccctgtgagctagctttcagttctggaggaaaaaattctctaggaactgaaaatcttaacttagtctccatgataactgaatcttacctcttgtaaaatttgccttaatagtatttttaatagttaaagcatttaaaatttttatgttggatttattttatttcattttggaactcgggttccaaaggtagatttaatcatactcctcaatttgtggcacacttaaaaaaaagaataactttattgtggtaagaatacttaacatgaaagctaccctcttaatacgttttcaagtatacaatacagtattgctaaatataagtacagtgttgtacagcaggtctctagggctcattcatcttgcttaactgacactttatgcctgttgattagaaactttccattgaggccgggcatagtggctcatgcctgtaatcctagcactttgggaggctgaagcaggtggatcacctgaggtcaggagttgagactggcctggccaacatggtgaaaccccatctctactaaaaatacaaaaattagccaggtgtggtggtgcgcacctgtaatcccagctactcgggaggctgaggcgggaggatcacttgaacctgagaggttgagcttgaagtgagccaagatcacaccactgcactccagcctgggtgagatagcaagactctgtctcaaaaacaaagaaaaaagaaactttccattgatctttccccagcccctggcaactaccgtttcacttttgtattccatgaattggcctattttagatactaattttaagtggaatcatgcagtatttgttcttctgtgactggcttatttcacttagcataatgtctcaaagttcatccatgtagtcccatattgcagaagtttcttcttttctaaggctgaataataacattccactgcatgtgtattccacactttctttatccactcatttgctaatggacagttgggctgtttctgtatcttggctattatgaataattctgcaatgaatatggcagtgttaataactcttggagattccagtttcaatccttttggatcaatacccataagttgaattgctgggtcatatggtagttctatttttaattaattaattaattaatttttttttttgagaaggagtctcactcttgttgcccaggctgatgtgcaatggcacgatctcggctcactgcaacccccacctcctgggttcaatcgattcttctgcctcagccttctgagtagctgggattacaggcatgcccccagctaattttttttttttttttttttttttttgtatttttagtagagatggggtttcaccatgttggtcaggctggtctggaactcctgacctcaggtgattcgcccaccttggcctcccgaagtgctggaattacaggcatgagccactgcgcccggccctatctttaattttttgaggaacctctatgctatttttcatagcggttgcaccattttgcattcccatctacagcgtaagaggattccagtttcttcatatcctcaccagagctttttgtcttttgtctgataatagccatcctgacaggtgtaaggtgatatctcattgtggtttggatttgcatttctttgatggttagtgacatagtttggatatttgtccccactcaaatctcaggttgaattgtaatccccaatgctggaggtggggcctagtgggaggtgtttgggttataagggtggatccttcatggcttggtgctatcttcaaaatagtaaatgaggtctcacaggatctggttgtgtggctttgggaggctggggtggtggatctcttgagcccaggagtttgagaccagcctgggcaacatggtgaaacccaatctctacaaaaaatacaaaaattagctgggtgtggtggtgcatgcctgtgggcctagctactggagaggctgaggtgggaagattgcttgagccagggaagtcaaggctgcagtgagccgagatcgtgccactgcactccagcctgggtgacagagcaagaccttgtcaaaaaaaaaaaaaattgtgtggcacctcccccgaatctctcccactcttgctcccattcttgccttgtgatgtgcctgctccccctttgtcttctgccatgattggaagcttcctgggccctccccagaagcagaaactgctatgcttcctgtacagcctccagaaccgtgagccaattaaaccccttttcttatatataacccagtcttaggatttctttatagtagtgcaagaacagccttacacaattagtgacagagtgtctttctgttgggcatttggatggcttctttggagaactgtctattcaagtctttagcccattttaaaattgggttatcattattttttttgctatcaagttgtaggtagtccctatgtattttggaaattatccccttatcagatgtatggtctgccaacatttctccaccctgtagattgccttttttactctgttgattatttcctttgctttgcagaatttttttagtttggtgtagaaccacttatttatttctgcttttgtggcctgtgcttttggtgtcatagccatgaaatcgctgccaagactaatagcatgaagatttcccctatgtgttcttctacgagttttatagtttaggtctaatatttaagtctttaatccatttttagttgatttttgggatagtgtaaattaaggctgcgatttcattcttttagatgtgaatatccagttttcccgacactatctgttgaggagacttttgtcattatgtattcttggcatccctgtcaaagatcagttgaccattatttgcagattctgttaagtctctctctattgtgttccactggtctatatggctgtcttcataccagtaccatattgttttcatttctgtagttttgtaaaatattttgtaatcaggaagtgtgatgccttcagctttgctcttcattttcaagattagtttggctatttggggtcttttttggcctcacatgaattttagaattgcttttttttttttaattctgtaaaaaatgccattgcagttttgatagggaatgcattcaatctgtagatgactttgggtagcattggacattttaacaacattaagttttctaatccatgaccatgggaagtctttccatttatttggatcttcttcaatttcatttatcaatgttttgtagttttctgtttataagtgtttcaccccttagttaaatttgttcctaaatattgaacggggtcttgctatgttgcctaggctggtcttgaactcctgagctcaagcgatactcccacctcagcctttgtgacctgcccgcctcagcctcccaaagtgctgggattacaggtgtgagccactgcgcctggccaatttttttctattttttattctctatattgtcgatttctcctctaatttttattatttcatttcttctgttaactttgggcatagtttgttcttcttcttctagtggttttttttttttttgagatggagtctcgctctctcacccaggctggaatgcagtggcgcgatctcggctcactgcaagctctgcttcccaggttcacgccacttcttctagttttttgagatgtaaagtttggttgtttgagatgtttcctctttttaatataggcattcattgctataaacttccccgttagtactgcttttgattcaacccataagttttggtatgtagtatttttatttttaatttaatttagttttttcagagatggagtctcactctgttgcccaggctggagcacagtggtgcaatcatagctcactgcatccttgatctccctggctctataaatcttactgcctcagcctcccaagtagctgggactacaggtatttgccacaatgcctggctaattttttgttagttagtttgtttctgtacagaaggggtctcactatcttgcccaggctgttctaagactcctgggctcacataatccttctgtcttggcctcccaaagtgctgggattacaggtgtgagccactgcacccagctggtatgtagaatttccatttctattcatcttaagattttttttgatttaccttttttttttttttttttttttgagacagagtcttgctgtcccaggctggagtgcagtggtgcaattatggctcactgaagcctcagtcctccaggctcaagcgatcctcttgcctcagcctccagagcagctgggactatcagcatatgccaccacacctggctaattttcttgattttcttttcttccttttttttttttttagtagagatgagacctcactttgttgcccaggctggtcttgaactcctgagctcaagtgatcctcctgctttggcctcccaaagtgctgggattacaggcctgagccaccatgcctggcctcagagctgtttttttctgctattggcttctagttttatttcactgtggtcagaaaagatacttggtatgacttcagtcttcttaaacttgttaggacttgttcgtgactgttatggtttgaatgtttgtcccctcctaaacttatatgttggagatttaatcaccaatgcaacagttttgggaagggaggcctaatgggaggtgtttaggtcatgagggctttatccttgtgagtggattaatgctgcacttgaacaagcgatttggagtgggttcatcatcttctgcacttttgccatgtgaggagcagcgttcttcccctctgaaggatgcagccaaacttcgcagcaccccagcaccttgatctttcacttcccagccttcagagttgtgagtaatcaatgtctattctttacaaattatccatcctcagctattctcatacagcagcacaacatggatgaaggcagtggcctaacactacaatttactctggagaatattccacatgcacttgaaaaggatgtggattctgctgctgttgggtggaatgttctctgtatgtctgtcaggtccatttagtgtacagtgttcaaatcatttgtttccttatcaatagtctatctggatgttctatccactattgaaagtggggtattgaagtctgttactgtaattgtattgcttttttttttcctttttacaaagtagccagaggctcagatattatcgtattgctttctctctttagttctatcagcatttgctttacatatttaggtgttctgatgttgagtgaatatttataattgttatgtcttcctagtgaattggccgttttatcattatataatgtccttccttgtctcttatgacagttttaaattttaactctattttgtctgatccaagtataaccacttctgcactcgtttaccagttgcatggaatatgtttaaggacacacattgctctatgtgtgtccttaaatctaaagtgagtttcttatagacagcatgtagtcttgtttttttatccactcagccattctatatcttttgattagggggtttaatcaatttacatttaaagtaattatttatagggaagaatttactacagccattttattgttttttgtttttgcttttgtttttttgagacagagtcttgctctgtcgcccaggctggagtgtggtggcacgatctcagctcactgcaacctctgcctcatgggttcaagtgagcacgtctggctaatttttgtatttttagtagagatggggtttcaccatgttggcctggctggtatcaaactcctgacctcaggtgatctgcctaccttcgcctcccaaagtgttgggattacaggcatgagccaccatgcccagccttattaattggtttgtgttagtcttataattcttttgtccatctgttcctctcttgctgtcttcctttttgttttgttttttttttttttgtattgatatgcttttattccttcctctttttcttttgtgtaatttttacagatattttctttgtcatcatcatggggtttacaaaaacaatcttatggttagaacagtctattttaagctgataacaacttaagttcaattgtatacaaaacataatacttttattaccccctacacacgctttatgttgtcataatttacatgtacttatcttatgtatctattaatgtatcctttaactataggtatttataatgcttttgtcttttaacttttatactagaatcaaaagtgatttacccacaaccataacagtattgcagtattctgtatttgtctttgtatttacctttaccagtaagttttatattttcttatgcaactgttttgctgttttagcatccttttgtttcaacttgaagaactccctttagcatttttttgtacggcaagtttagtggtaataaaatcttttagcttttgtttttcgtgggaaaacttcatttctccttcattttggaaggagtattttgccaggcatagtattcttagttgacaagttttttttttcctttcagtactttgattatattaccctattcccttctggcctacaaagtttccactgagaaatcaacttatagtcttataggggctcccttgtacatgtccttatacattctcctcttaaccatttattatttattattattaatattattattatttacagatagggcttactctgtggccaagacttcaatgcagtggtgtgataatagttcaatgaagcctcgaatgcctgggcaaaagggatcctcccatctcagcctccagattagctgggactacaggcacaggccacaatgtcccgctaattattttatttttcgtagacacagggtcttgctttgttgcccaggctggtctcaaactcctgggctcaagtgatcctcctgccctgacctctcaaagtgctggaattacaggcatgaatcaccacaccaggcacttcttgaccatttttaagtgtataattcagtagcattaagtatttcatattgttgttgaaccagtctccagacttcttttcatcctgtaaatctaaaactctatacccattaaatgataactcttcatccctcccttgccttagcacctgtcagccaccattccactctttgtctctatggatttgactaatctgtttatctcatataagtgaaatcatatgatatttgtcatttaattttattgtattgtagagatggatctcactctgttgcccagactggagttcagtggcatggtcatagccccctgcagccttgacctcctgggctcaagcaattctcttgcctcagcctcccaagtagctggaactacaggcatgcattaccttgcatggctaattaattttttttgtagagacaggatctcattatgttggccacgttgtttccaaactcctggtttcaagcaatcctcctgccttggcctcccaaaatgctgggattataggcatgagccacctcacctggactatttgttcttttttgtctggcacatattgcttaacataaggtcttcaaagtttatcagtgatgtagcatgtttcaaaatttccttctgttttaagaataaataatattctgttgaatagatactctacattttacttattcattcatcggacaatagaaacttgggttgcttacaccttttggttattgtgaatactgctgctatgaacacaggtatacacatatctactcatgtcctactttcaatccttgtaggtatatacccagaagtggaattgctccctcactatttatttttacttttatttttgaaacagagtcttgttctgttgtccagggtggagtacagtggtgcaatcttggctcaccgcaacctccgcctcccacgttcaagcaattctcctgcgtcagcctcccaagtagctgggactacaggtgcctgccaccacgtctggctagtttttgtatttttagtagagacagggttttactatgttggccagactggtcttgaactcttgacctcaaatgatctgcctgccccagcctcccaaagtgctgggattacaggtgtgagccaccgcgcctggccaccccctcactatttttaattataaactaaatggctctgtgttgaaaaaagaaagtcaggatgggcacacagtctgttgaatatttaccaccagtttgatatcttaactggaggtcctcatttaaaatgaagaaaaggggccaggtaaggtagctcacacctctaatcccaagactttaggaggcctaggtggacagatcatttgaggtcaggagttcgagaccagcctggccaacactgtgaagctccgtctctgctaaaaaagtacaaaaattatctggcatggtggtgtgtgcctgtagtcccagctacttgggaggctgaggcaggagaatcatttgaacctgggaggcagaggttgcagtgagccgagatcgcaccactgcactccagcctgggtgacagggtgagactcagtctcaaataaaataaaatagccggtgtggtggctcacgcctgtaatcccagcactttgggaggctgaggcaggcagatcacgaggtcaggagttcaagaccaacctgacccatatggtgaaaccccatctctactaaaaatacaaaaactagatgggcgtggtggcacgtgcctgtagtcccagctactcgggaggctgagacagaagaatcacttgaacctgagaggtggaaggtgcagtgagccaagatcgtgctactgtactccagcctgagcaacagagtgagactctgtctcaaaaaataaaataaagtaaataaaatgaaggaaagggatttttttttgagacaagttattgctttgttgcccaggctagagtgcagtggcacaatcttggctcactgcaacctcagtctcctaggttcaagtgattctcctgcttcagcctcccaagtagctgggattacaggtgaccatcatcatgcctggctaatttttgtatttttagtagagacagtgtttcaccatgttggccaagtaggtctagaactcctgacctcaagtgatccacctgcctcggcctcccaaagtgctggactattttggaaggtgtgagccaccgtgcctggctaggaaatggattttttttttttaccttctcacagattcatataaggtcccactcactgacattctttcaatcacatcttgtttctggtgtaactatttacacttctctctctctctctctgttcataaattgtacccatcacaagtatcataatcttattaaacacttcccatactcacatagctaatagccttacattgtagatatgtaatttcacacaatctgttgctttaagtttatataaaagatcaagttcctttcaataaaagaacaacaacaataaaaagattatgaccttacaaaaagcccttgaaatgtctaaaatagattaaataaaatatagaccagcacctcaacagggaataagaaacagctagcatttcacagacttacacaaagccaatgaacacatgaacatgtactcattagcatgaataatcaaataagtagaaatttaaaatgaggttttctttttcacctctcagattggtaggtaaagagactggtattatggtttggtgaggctgtagggaaataaacagagtaggaatggaattaagcacaaccattttgttttttaaattcattttattatttttatatattttgagacaagatctcactctgtctcccaggctggagtgcagtggcgtgatctcggctcactgcaacctccgcctcctgggttcaagtgactcttgtgcctcagcctcccgagtagctgagattacagcggtgcgccaccaagccccgctaatttttgtattttttagtagagatgcggttttgtcatgttggccaggctgtaagcacaaccattttgaaacacaatttggcaacaacttgtgagctggcatatatactttgagcaatttgtatctcagaagcattccacaagtccataagaatatatacatgtccatagaaaatacacatctgttctaatagcaaataattgaaaacatctacaagtccatccataggtgtgatatgttgaattgtgtcccctaaaaagataagtttaagtcctaatccatggcatacttgcgaatgtgaccttacttggaaatacagtctgtgcagatgtgattagttaagacaatggtccccaaccttttttgcaccagggactgatatgagaatctaatgctgccactgatttgacaggaggcggagttcaggtggtaatacttgtcaccactcacctcctgccatgtggcccggttcctagcagtccacagactggtactggtctgcagcccagggattggggacccttgagttaagatgagggcatattgatatggctccgatgagtggaggaacacaagggttcttggtcctcatgccggtttagataaaacaacatggacacaagtggagtggttttttttttgttgtttttttttgttttgttttttttttgagacggagtctcgctgtcgcccaggctggagtgcagtggcgcaatctcggctcactgcaggctccgccccctggggttcacgccattctcctgcctcagcctcccgagtagctgggactacaggcgcccgccacctcgcccggctaattttttgtatttttagtagagacggggtttcaccgtgttagccaggatggtctcgatctcctgacctcgtgatccgcccgcctcggcctcccaaagtgctgggattacaggcgtgagccaccgcgcccggccgtggagtggttttaataggcaagtttaataggcaagaagggagaaggcagaaggaagaagctccctcgtacagagacaagaggcagagaggctccaaagccgaaagagtagacaccaagtggagtgaaaaccagctaagtttatatagaggctggaggaggcggtgtctgatttgcacagggctcaggggattggtttgaccaggcatgtcattcacgcagcccgggaaaaagctggtccacccaccctagccttttaatatgcaaatgcagagcaccatgatgttctacacacgtggggatacgtgggggcggccatgtttgccaggcacttgtggggcaagggcaagaagaagagggtgggaattgtcatgtttgggtagacccagtttctaatggccagcatgtgcatatcaaaggttgctggcctggctctaagagcctgggcttgacaagaaacctttctggaacagctttaaaaatgaaaacttcccaaggaccccttttcctctctatctgcctaaaataatttcttaataactcctaccacaatacgggattagagttgatcctaaacccaatgatgggtgtccttggaagaagaggagaggacacacagaaacaagacacatatagagaggaagaccatgtgaccacattggcagagattggtgtgatggggccataagccaacgaacaccaggagccaccagaagctagaagaggcaagggaggattcatttctagagctgttagagagactgcagccccactgagaccttgattttgcaaatccgccctctagaactgtgggaaaataaatttctgttgttttaagccacccaatttgtggtaatttgttatggcagccccaaaaaaatattgtaataagggttagttcaataaatagtggtacaggccaggtgtggtggctcacacctgtaatctcagcactttgggaggccgaggtgggtggactgcttgaggcaggagttcgagaccagcctgcccaatgtggtgaaacctcatctctactaaaaatacaaaaattagctgggcatggtggcacgtgcctgtagtcccagctactctggagactgaggcaggagaatcgcttgaacccaggtggaggttgcagtgagccaagattgtgccactgtgctccagcctggacgacagtgagactctgtctcaaataaataaataaataaatagtggtacatacacgtgactaaagatggaagtgaaaacctcccatctattccctttttttcgtttttttttttgagacgcagtctttgccctgttgctcaggctggagtccagtggtgcaatctcggctcacctctgcttcctgggttccggagattctcctgcctcagactccaagtagttggaattacaagcccacaccacgccaggctgatttttgtatttttactagagacgggggtttcactatgttggccaggctggtctcaaactcctgacctcgggtgatccgctcaccttggcctcccagagtgctgggattacaggcatgagccaccgtgcccagcctattctcttttatgttttggtttctgaactatgtgaaaataatttatttcatgaaaataaagtacaatttaagggctgggtgtggtggctcatgcctgtaatcctagcactttgggaggcggaggcaggagtattgcttaagctcaggggtttgataccagcctgggcaacatcgtgaaaccccatctctacaaaaactagccaggcatggtggcatgcatctgtagtctcagctgctcaggaggctgaacaggtaggattgcttgagcctgagaggctggggttgcaatgagtgtgatcgtgccactgtactccagcttgggggacagagtgagaccttgtctcaaaaaataaataagtaaatatggctcacgcctgtaatcccagcagtttgtgaagctgagccaggcggatcacctaaggtcaggagttcaagaccagcctggccaacatggtgaaaccccatctctactaaaaatacaaaaattagcctgatgtggtggcgtgtgcctgtagtcccagctattcaggatgctgaggcaagagaattgcttcaacttgggaggtggaggttgcagtgagccaagatggcaccattgtactccagcctgggcaacaagagcgaaactccgtcttgaaaataaataaatgaataaataaaataaagtaaatgtgattctgagccttgttctatatagcactaaaagattaactcaaagcacatgttgtaagaaaactggaagaggaagagagtcccgatcaagtagcataggaagaagagtttttatttttatgaatataagaaaaccagcctgggcaacatggtgaaaccccatctctacaaaaaagtacaaaagtactttttttcagacgtggtggcacatacctgtagtcccagctactccagaggctaaggtgggaggatctcttgagcctgggagagggaggctgcagtgagctgtaattgtgccactgcactccagcctgggcaacacagcaagaccctttctccaaaaaaaaaaaaaaaaaaaaaaaaagagaaaataagataagcaagcataccctagaaggcctgggtacttagcatacattctgttgaatcaagatgcatgagagtcttaatgatagtttactcatactgtacttaatatgcaaaattagaataatcaagtaagaacaatgattagatgccatttttaaattctaaaatgaatgccatgtggggatgagagtgctggccttgaactcagaaaacctcggttcaagtctgggtttttcccatttctaggttgtgatcacttccctccctgagtccttaattaaaatatccagtttaggccgggcgtggtggctcacgcctgtaataccagcactttggagggccgaggcgggtggatcatgaggtcaggagatcgaaaccatcctggctaacacagtgaaaccctgtctctactaaaaaatacaaaaaattagccgggcgtggtggtgagcactcccgagtagtcccagctactcgggaggctgaggcaagagaatggtgtgaacccgggaggcggagcttgcagtcagccgagatcacgccactgtactccagcctgggcgacagagtgagactccgtctcaaaaataaaataaaataaaatatccagtttataaatagggataacaatatctgtctggcctgataacaagggcttgtaagtacaaaatgcaataaggagaaagcaattcatggactttgactctcagtacccaggaaaagtcttgtgcgtgaaggaagaacatagaggaagtcattagtgataaggaccacaggtgcagttgcaattcctgccctttctggcaaagaaaaaggagagacctgtgccaaaataagcagcttctaactcaagtcatacaccaagtcagtcccttgcactgcacattgtcctgctgctggcactgtcctggtcttgccagtaataggttgggtatcctaatctactgcccggaactttcagtggtttcctcttcagtttatctagttaaatgttcgggataatccttcccctcggccccctcccccacaagtgaagaaactccatctcaaaatggcttcaccaatgctgaggtgtattatctcgcagaagaagaaatccagagaaagtgtggcttcgtgttaacaaatacatggactggaagatgatgtctgttagctctaccacttttggcttgttttatgcagtctaactctcattacgtctgcaagatgattgctctagatgtccaggagaagcagcgagatcaagttttctttttgtgtatcttttttgtttgtttgttttttgagacggagccttgctctgtcacccaggctggagtgcagtgatgggatctcggctcactgcaacctctgtctcccgggttcaagtgttcttcctgcctcagcttcccgagtagctgggactacaggtgcccgccaccatgcccagctaacttttgtatgttttaatggagacacggttctgccatgttggccaggctggtctcgaactcctggcctcaggtgatccgcctgcctcggacttccaaagtgctgggattacaggcatgagccaccatgcccgaccttatatatcattttttttgttgtttgttttttgagacagggtctcactctgtcacccaggctggagtgcagtggcacgatcttggctcactgcagcctccacctcccaggttcaagcaattcttccacctcagcctcccgagtagctgggattacaggggtgtgccaccatgcctggctttttttttttttgagacagagtctcacactgttgcccgggctggagtgcagtggcatgatcttggctcactgcagttcaagcaattctcctgccttagccccctgagtagctgggattacaggtgcctgctaccaccctcagctaattttttgtatttttaatagagacggggtttcaccatgttggccaggctggtctcgaactcctgacctcgtgattcgtctgcctcggccttccaaagtgctgggagtacaggcatgagccaccgcacccggcctgtatatcttttttaaaaggaaaagaacatatcccagaagtttccaactgagtttccctctgggtcaataccagaattgggtgggggtcttcagctcacccctaaactcatcattgataagcagaatgaatgaccatggctggtttagacaactgaaatttccgctggccacataaggaaggatagacactagaacaaaatcaggtctatcagagtggaagaaagggaagagggctggtggggaggcaatgaatagtgccagcgaactggaaaatcatcctgacatttcggttctgctctttgactacggtaactgtgtgtaagttaaaaggggaggtccatccatcattacctttcttatctcagatagctaagagacatcatgaacttaactgtgtccaaaatgaaactactggtcttcttcctcacatctgctccactggcagcctccttggccatattaattaacaacaactccttctattgaaccaacaccttggagttatcctggactcttgtcctcttgcattcaacgtcttaaccattggcaaatcctactggcatgacctttgaaatactgtacccaacttggggcccagggaactgtggcagggatttgggggaaggctataactctctacctcagcatgaaacccagccctgctccagtaccagagaaatagggggtatctggaggtagcacccttggcatggaattgggtgtcctcatgatggcagtggcagtggtaaaacttcacgtggctctgtgaatgatggacaggaacaagaaaccagaccagaagaggaggaacaagacagaggctgatatggtttggctgtgtccccacccaaatctcaccttgaattgcgactcccacaattcccacgtatcatgggagaaacctggtgggaggtgtgggggcgggtctttcccatgttgttcttgtgatcctgaataagtctcatgagatctggtggttttaaaaatgggagtttccagctgggcacagtggctcatgcctgtaatcctagcactttgggaggccgaggtgggtggatcacctgaggtcaggcgtttgagaccagcctggccaacatggcaaaaccccgtctctagtgaagaaacaaaaaaattagctgggcctggtggcacgtccctgtagtcccaactacctgggaggctgaggcaggaaaatcccttgaatccgggaggtggaggctgcagtgagccaagatcgcaccattgcactccagcctgggcaacaagagtgaaactccatctcaaaaaaaaaaaaaaaaaaaaaaaaaaaaaggccgggcacagtggctcacacttctaatcccagcactttgggaggctgaggtgggtggatcacgaggtcaggagattgagaccatcctggctaacacggtgaaaccctgtctctactaaaaatacaaaaaattagctgggcgtggtggcgggagccagtagtctcagctactcgggaggctaaggcaggagaatgggtttgaatcctggaggtggagcttgcagtgagccgagatagcaccactgcactccagcctgggcgacagagtgagactccatctcaaaaaaaaaaaaaaaaaaagaaatacctgagactgggaaatttataaagaaaagaagtttaattggctcccggttctgcaggctgtacaagcatggcaccaacatcactcagcttcatggggggggcctcagggagcttttattcatggcagaaggcaatgtgggagcaggcatttcacatggtgaaagcaggagcaagagagagagtgggggaggaactgtaacacacttcttttttgggctatgcaaattctccagttgcaccccgggtctaatgaatcagaaacactgggggtggaagcgtatttccagctacagccatgtgaaaagtcagcaaatcctctccccagaaagcaactataagtctgaacaaaattgacaagaacaactattttggtgctctggaaatcaataaaactcatacaacaatctgagaagtgtttaagcttgataacatgctgaacgttgggtaagaacagtggatgtctgaagcgttctttcctaggactgctcccatctcctctagccgagtgggtgtggaggttctgccagggcaggaccaggcatgaggacctgcagtggtgctgccaggttggagggggcttactggatttgctgtagcaggtgatgcccacacctatggcactgtcagtggaagtgacaacagttttgcctttcaagaaacgccataggaagtcctttagagtgaaagaaagcaacatcagagagcaactttaatgcacaggacaaaaataggccgggcgtggtggctcacacctgtaatcccagcactttgggaggccgaggtcggtggatcatgaggtcaagagatcgagactatcctggccaacatggtgaaatcccatctctctaaaaatacaaaaattagctaggcgtggtggtgcatgcctgtagtcccagctactcgggaagctggggcaggagaattgcttgaatccaggaggcagaggttgcagtgagccaagatcacgccactgcactccagcctgggcgacagagcgagactccgtcaccaaaaaaaaaaaaaaagaaaagaaaaaaagaaaaccattggaattgttaaatatgtgggctgatagaaaagactccataaatatatttttctcatttcttctgttaccttttaaaaaaggcataatattgtgtaaagcaataattataacattgtattgttgggtttatagcatgtataaatgtaatacatatgataatacaaaaaagagggaagagaattgagctttattaaagcaaaatttctatgttttatctgaattaaattagtaataatctgaactatatttagataagatgcatattgttatcaaaatatcaagttgtaccccttaaatatatagttttgtcaattatacctcaataaagctgaaaaaattactttgagatggctcttattaaaaaatacatattgtaatccatactgcaatgactaagaaaatttttaaatagttaaaaaaagaatttaaatgctgtactaaaaaatatgtaacacagaaatcagtgaaagaggggcagagaaacaaaaataggagacatatggaaaacaaatagcaggttgggtatggtggctcatgcctgcaatgctagtattttgggaggctgaggtgagaagattgcttgagctcaggaattcaagaccagactgggcaacataatgagaccccatctctataaaattatacaaagaaaaattagtggggtgtagtggtgtttgcctgtagtcctagctacttgggaggctaagatgggaagatctcttgagcccaggagttcgaggctgcagtgagctgtgatcacgtcactgcactttagcctgggctatagaatgagaccctgcttctaaaataataaaaaataaaaaaaaaaaagaaaagtaaattaagcaacaacaaaagaaaacaaatagcaaatggtaaatgtaaatccaaacttattaattacattaaatgtgaatggtctaaacattccaataaaaaacaagatatttggattggataaaaaaggcaaaatctaactataggcagtctgcaagagttacaccttaggttcaaagacacaaataggtggaaagtaaaaacatggaaaaagatatgctatgaaaatagtaggctggacatggcagcacatgcatctaaaatcctagcactttgggaggccaaggtgggaggactgcttgagctcaggagtttaagatcaacctgggcaatacagcaaaaccccatctctacaaaaaatacaaaaattagggcctgttggtacgtgcctgtagtcccagctactcagagactgaggtgcgaagatccttgagcctcagagatcaaggctgcagtgagccgtaattgggccactgcactacagcctgggtgacagagacagagtgagaccgtgtctcaaaaaaaaaaaaaaaaaagtaaccataagagagttgcagtcattagttatgtggctatcagctaacataaactttaagtcaagaaatattactggagacaacgaggaacatttagtaatgataaaagagtcaatatgtcaggaatgtacaagtcataaatatgtacatcgctaataaagcctcaaaaacatgaaacaaaactggcagaattaaaagagatataagaagatatggacagttcaacaacaatagttgaggatatcaatattctattctaattgatgaaaaaattagacaataaatcagcaaggatattaaagagttagaaaacattattaacctatgtgacctaattgatatatgtccaatgagtctcaactcattcagtgagaacagttaataaagacatttttattaccagaaaataaaattacagaataatatcccttaacaaaatattaatacaccaaattctgcaacatatataaaggattatatactctgaacaagtgggatttattataggaattcaaggttggttaacgtctgaaacttgaccagtgtaatatactatactgatagaacaaaggacaaaaactacatgatcctctcaataatagatgcagaaataccttctaacaaaatctaacactctttcatgttaaaaactctcaacaaactaggaatagatgggaacttcctcaacctggataaagtgcatctatgaaacacccacagttaacatcatacttaacagtaaaagactgaacatttccctgaaatgtcaggaacaatgcaaaatgtcagttcttgctacttctattcaacactgccctgggggtcccagacagtgttataaggccataaagatgaaaaaagactgaagtggacatttcattaaagaagatatacaaattgctaatcagcattatgataaggtgctcaacatcattagtcattagaaaaatgcaaattacggttacaatgaaatactactatacgttcattagaatggctgtaatcaaaaaagaaaaacaataccaagtgttggtgaggatggggagaaaatggaaccatcatacgttgctgatggaaatgtaaagtgatgtagacacttggaaaagctaattggcagttttttaaaaaagttaaacaaaagttaaaaaaccaaagagaaataaaaccatatgtgttcagaggcatgaatgccagtgtttacagcagcattattcataatattcaagaactggaaatactcctgtatgcctgtctaaggctgttgtaacaaactaccatgcacacggctggatgcggtggctcatacctgtaatctcagcactttgggaagccgaggaggtggatcacctgaggtcaggagattgagaccagcctggccatgatggcaaaaccctgtctctactgaaaacacaaaaaatgagccgggtgtagtggcaggtacctgtaatcccagctacttgggaggctaaggcaggagaattgcttgaactcgggaggtggaggttgcagtgagccgagatcgtgccattgcactccagcctggctgacagagagagactctgtctcagaaaaacaaacaaaccagaaaaacaactaccacaaactgagtggcttatataacagacattgtctcatagttccagaggctaggagagatgaaggtatcagcaaggctggttccttctgaggctgtgaagaatctgctccatgcctctcccctagctttttggggtttgctgacaatatctggtgttctttggcttgtagaagcaccacacctatctctgcctttatattcacatgggggtgttctccctgtgtgcttatgtccaaatttcctcttttgtaaggacaccagtcatgctggacttaggggttcatcctactccagtatgaccttatcttaactaattacatctgcaaaaccccatttccaaacatggtcaccttccaagttattgggggttaaaacttcagggctgggcgtggtggctcatgcctgtaatcccagcagtttggaaggccgaggcaggcggatcacaaggtcaggagatcgagaccatcctggctaacatggtgaaacccagtctctattaaaaatacaaaaaattagccgggcgtggtggcgggcatcccagctacttgggaggctgaggcaggagaatggcatgaacctgggaggcagagcttgcagtgagccgagatcgcgccactgcactccagcctgggtgacagagcgagactccgtccaaaaaaataaaactttaacatatgtatttggggatggggcacaattcaacccataatacatccaaatgtccctcagcttatgagcggaaaaacgatctcagatacagtctatccatgtaacagaatagtattcacatatagaaaggcacaaattacagataagtgctataacgtgaactgagctctaaaacatcatgctaagtacaataggccagatgcaaaagacagtgtattgtatgatactatttacatgaaatgtccagaaagggcaaatttattgacagaaagcaggtcagtggttgcctgcagcttggggtgggagaagggattaagcaaaaactaccatgaggtaaattgggctgatggaaatgttttaaaactgcattgtgctggtagctgtcaactacataaatttactttaaaaatcattaaagtgcatgcttacaaagggtgaattgtatggtatgtaaattgtatcttaataaaactgttaaaaaaaaaaaacaaaccaaacctcccaggttgtggagcagcaattttttttaaaagaacaataacaataaaccaatgcctctttttttttttttttttttttaggcagggtctcactctgttgcccaggctggagtgcagaggtgcgatctctgctcactgcaacctctgccacctgagttcaagcaattctgccacctcagtctcctgggtagctgagactataggtgtgtgccaccatgcccagctagtttttgtattttttgtagagtcggggtttcaccatgttgcccaggctggtctcaaactcctgggctgaagtgatctgcccgtctccgcctccaaaagtgctgggattatagggttgaaccaccatgcccagcccctttccttaaaaacagaaagaagttgtgaagcagaatcatcctgtcatgataaaggtatgactaaataatacgtgaaaaacatgcaactcaattaactcttcacaagtgtaatgatctcaaacaaaatatactacccttcatctcaacttaaataccaatcttcatgcaataagtaaaatctgcactgatgagacttttaaaacagcagccccaccacatatgaggcctataaaccaagcttgtccaacccgcagcctatggtgcctgtggcccaggaaggctttgggtgcagcccaatgcaaattcataaactttcttaaaatgtgagattgcctttgcgatttttttttttttttttttttttttagctcaccagctatcattagtgttaacgtattttatgtgtggcccaagacaattcttcaaatatagccaatttgaagccaatatggcccaggtgatggggacccctggggtttaaaccgcacaaactttaggcattatcatttcaagtttaagtctcacccaactcctacccacctagtagggtagaggttcattaagaaaattatgtgccttaaagggaatagataattacatttttaaaaaacaactttgaggctgggggcggtagctcatgcctataatcctagcacttggggaggctgaggcaggtggattgcttgagcccaggagttctaaatgagcttgggcaacatagggagaccccatctctaccaaaaaataaaaaaaaaattagccgggtgtgtgggtgctcacctgtagtcccagtgagaggtgacagcatgctggcagtcctcagaggcctcactcgctctcggcacctcctctgcctgggctcccactttggcagcacttgaggagcccttcagcccaccgctgcactgtgggagcccctttctgggctggccaaggccggagctggctccctcagcttgcaaggaggtgtggagggagaggcatgagcgggaacaggggctgtgcgggcacttccgggccagctggagctccaggtgtgcgtgggcttggcgggcccgcactcggagcagccggcaggccctgccggccccatgcaatgaggggcttagcaccagggccagcggctgtggaggccctgtactcagagcagtgccgcccaccggcactgggctcgatttctcaccggccttagctgcctccctgcggggcatggctcgggacctgcagcccgccatgcctgagcctccccctctctgtgggctgctgtgctgccggagcctccccgacaagcaccgccccctgctctacggcgcccagtcccatcgacgacccaagggctgaggagtgcgggtgcacggcatgggagtggcaggcagctccacctgcagcccaggtgcgggatccactgggtgacgccagctgggctcctgagtttagtggggacctgcagaacctttatgtctagctaagggattgtaaatgcaccaatcggcaccctgtgtctagctcagggtttgtgaatgcacgaatcgacactctgtatctagctactctggtggggaggtggagaacctttgtgtctagctcagggattgtaaacacaccaatcagcgccctgtcaaaacagaccactcggctctaccaatcagcaggatgtgggtggggccagataaaagaataaaagcaggctgcctgagccagcagtggcaagctgcttgggtccccttccatactgtggaagctttgtctttctttgcaataaatcttgctgctgctcactctttgggtccacactgcctttatgagctgtaacactcaccacgaaggtctgcagcttcactgctgaagccaatgagaccacgaaccccccgggaggaatgaacaacttgagacgcgctgccttaagagctgtaacactcaccgcgaaggtctgcagcttcactcctgagccagcgagaccacaaacccaccagaaggaagaaactccgaacacatctgaacatcagaaggaacaaactccggacacgccacctttaagaactgtaacactcaccgcgagggtccacggcttcattcttgaagtcagtgagaccaagaacccaccaattccggacacaccagctactagggaggctgaggtgaggggatcacctgaatccaggaagtcgagggtgcagtgagccgagatcatgccgttacactccagcctgagtgacagagtgagatcttgtgtcaaaaaaacagaacaaaataaaacaagaacgttgaataggctgtgtgttaattctgagatggagtccagacttaagaatgatcctgaggcttagacccatatccaagaggatgattccagcctggcacttataggttcttcaggcacttcagatgcaccctgtcctgaattaagccctttgtccttgaacctgctttccttggtaaacagcaccaagggggctagaaacctgggggctgcccttaccttccctctctcaccatgcacctctaatgggtggctggacttgtggttgcatttccgtgatctcccagctttcttccagtgatggccttaggtgggctcttatcctgtctcccaaatggcctctctgccttgagtctcaccccatctgctctcagtccacccactgagctattccagagaccattctgactccctgtggacacccctctggtggcttctcctctctgtcagttagaaattgcttttgactgcatgtaacaaatgtggttacgctatttaaccaaataaaggtttatttttctcgtgatgaaaagtacacagataagcagcctacttccatcgataaccattgagggtttcttatgactcttacagcaatgaaatgtgtatttacagtataaagatatacaattttaaggttttaatataattgggcctaagcacagtattttttgttttagttttcaactgcccaggtgattctattgtgcagccagggttgataaacactgcatctaggcccagtgcctttgatttgcagctgaggtctagagagaattattgaaactgcagtcccagctacttgggaggctgaggttggagaattgcctaagcccagcggggtgaggctgtagtgagtcaagactgcaccaccgcactccagcccgggcgacagagcaacactccatctaaaaaaaaaaaaatttctggtctacctttttgcccaccttttaaccacagaggtccccaaacatgaattttcactctcaggaaggctgaaatgacacattacaagcggtttagtcatctgcacgtgccgccatctgatttaaggcatctattcctcctcaccattcctgacaaagttgaactgtctacatgtgccacattctcctctttctctaattccttccctccttccctcctccctttcttccctccctccctccttccttcttctttctctttctttttctttctctctttctctttctttctctttctctctcactctcttttcttctttctgacagggtttgcctgttctgcttctttaaaccctggggttcaagtgcaaaggtccctctcatctgatttccctattttattttatttaagttagatactccacgatgatgatgatgattattgttgagacaggatttcattctgttgcccaggctggagtgcaatggtgcgatcacaactcactgcagcctcaacctcctgggcccacgcgatcctcctacctcagcctcccaagtagcttggactacaggggtgtaccaccatgcccggctaattacatgtgccagattcaacccacgttccagggttccaaacaaccaaggctctatcatcctgtcttaacaaatataccttcataaagacctggaaggcaggttgaaatgtggaattcttggacttctttcagttctacgtagaagggtagcagtggagagctggctgcctgcccgcccctggcctttcctcctttccccacccctgctccttgtggcactgggcagggcctacgttcaaggctagcagtgtactcaacaagggacagtccctgtgtggcctgttcaggatcctatacacaggctcagggctctttgggcaggaaattccaggatccgggtactcaagtggtgttctaaacagtggttcttggccgggtgtggtggctcacacctgtaatcccagcactttgggaggccgaggctggcagatcacttgaggtcaggagttcgagaccagcctggccaacatggtgaaaccccatctctactaaaaatacaaaaacttagccaggcatggtgtgcacgcctgtagtcccagctactcgggaggctgaggcaggagaatcacttgaacccagcaggcggaggttgcagtgagctgagattgcaccactgcactccagcctggtgacagagtgagactccatatcaaaataaatacataaataaataaaaacagtgattcttaactgggagtgatttggcaacgtctggaattatttttggttatcccagcctggcagggagggacagggtattactggcatctagtgagtaggggctagggattctactgaacatcctacagtgtacaggacagcctccacagcaaagaactgtctggcccaaaatgtccatagtgcccacattcgatgccctgcattaggaagatataaatactcttaaatatcacagagttaaattccttacccctgttctagcagagatgatattcttgcggggggagcatcttcttggcttcaacacattcttttctccatgggagatgatgccagaagagggacagaacagggcccagtaaagcatggggcctggggccagggacccccttgttcaggtgtgacgaccatcctacgaaggcaccacccaggcatcattagaccgtctcaaaagaagagtaattcactgtcccaaagcagctctctcgtgtctgtgggcggatcccttggcaagtttacaatgaactgaaatctgccgaacttcctggaacccaaagaaactttagccttgggcaaaggccctttggccagcatttgcactgtttatgcaaccgtttagaatatacgaattatctggagactactaccaaatacaacaggcaaaactgcaaatatgtatacttcctagaggatgataaaaaaatgtgaattgtatttctctgatagaggatgcattagagtctgagggtctaaatagcgtaaataataaataagtaaataaatcgatagtagtgtactccaaacgaggctggaatagcttctattgttgtttcacactggacttcaattaagtctcagtattttgccatactcaatattaagtactaggctggacgtggtggctcatgtctgtaatcccagcactttgggaggccgaggtgggtagatggctggcttgagctcaggagtttgaaaccagcctgggcaacatggtaaaaccccatctgtacccaaaatacaaaaatcagccaggtgtggtggcacatgcctgtggtcccaggtacttgggaggctgaggcaggaggatggcttgaacccaggaggtggaggctgcagtgagctatgatggcgccactgcactccagcctgggtgacagagcgagaccctgtctcaaaaatcaaacaaacaaccccctcgccccggacaaaagtagtttgcactattttctcatttcacaatatgtttttgaaatatttcccttgaaaggtaagtcatatttatcattcctgttgtatggaggcatcataaattatttcaccattctaccctccttgagtgttgtggcctttaggccagacaaaaacgcaggtgatgcctagaagccaactagttgccgtttggttatctgtagggttgtggccttgccaaacaggaaaaatataaaaagaataccgaattctgccaaccaaataagaaactctatactaaggactaagaaaattgcaggggaagaaaaggtaagtcccgggattgaggtgtagcgactttctataccctcagaaaactaaaaaacaagacaaaaaaatgaaaactacaaaagcatccatcttggggcgtcccaattgctgagtaacaaatgagacgctgtggccaaactcagtcataactaatgacatttctagacaaagtgacttcagattttcaaagcgtaccctgtttacatcattttgccaatttcgcgtactgcaaccggcgggccacgcccccgtgaaaagaaggttgttttctccacatttcggggttctggacgtttcccggctgcggggcggggggagtctccggcgcacgcggccccttggccccgcccccagtcattcccggccactcgcgacccgaggctgccgcagggggcgggctgagcgcgtgcgaggcgattggtttggggccagagtgggcgaggcgcggaggtctggcctataaagtagtcgcggagacggggtgctggtttgcgtcgtagtctcctgcagcgtctggggtttccgttgcagtcctcggaaccaggacctcggcgtggcctagcgagttatggcgacgaaggccgtgtgcgtgctgaagggcgacggcccagtgcagggcatcatcaatttcgagcagaaggcaagggctgggacggaggcttgtttgcgaggccgctcccacccgctcgtccccccgcgcacctttgctaggagcgggtcgcccgccaggcctcggggccgccctggtccagcgcccggtcccggcccgtgccgcccggtcggtgccttcgcccccagcggtgcggtgcccaagtgctgagtcaccgggcgggcccgggcgcggggcgtgggaccgaggccgccgcggggctgggcctgcgcgtggcgggagcgcggggagggattgccgcgggccggggaggggcgggggcgggcgtgctgccctctgtggtccttgggccgccgccgcgggtctgtcgtggtgcctggagcggctgtgctcgtcccttgcttggccgtgttctcgttcctgagggtcccgcggacaccgagtggcgcagtgccaggcccagcccggggatggcgactgcgcctgggcccgcctggtgtcttcgcatccctctccgctttccggcttcagcgctctaggtcagggagtcttcgcttttgtacagctctaaggctaggaatggtttttatatttttaaaaggctttggaaaacaaaaatacgcaacagagaccgtttgtgtgacactttgcagggaagtttgctggcctctgttctaggtcatgattgggctgcaagggcagagaaggtagccttgaacagaggtccttttcctcctcctaagctccgggagccagaggtttaactgacccttttggggatttttgagggcagtgatcttaactttgggtgcacagttagcttatttgaagatcttactaaaaatacaccagagcccaacctccgaccaattacatcaaaacctgtcctagtgcagggtgagtattgctgttttttgaaagtttccaaaagtgattttgatgtgcacctacgattgagaactgtcgtttgaggacagtgggtggagtttcgtatttggaaattagaagacctggagtttccattacaccgaattggcacttaataactgttgtcggagcatttcttaagccacattttcgtaaagtggctttaaaattgctctgccagtaggcaggttgctaagatggtcagagacaaacttctgaacgactcttgtaaaatatacagaaatattttcagaacttttatcagtaaaattacaaaacgtgttgcaaggaaggtgcttgtgataacactgtccccagaaccttagtgaagttaccaactggtggaaaattttctcttgcactcggcttaaaaatcatgagggaatatttactatacgaatgagattcagtctttaaaggggtttacagaaacgtgagaggacaggaacagttagtctgtgtaaatgtctgaaatatatgtgagggagataatgagtttagcctttttctttaataggtctccagattttctggaaaaggttctttggcatttgactccattttgctgtttcatttgtcagacttctttttgtccctctttacttctccccacataattcaccagtactagtgttttgtttttcagaccaagtctcgctctgtcgcccaggctggagtgcagtggcgcgatctcagctcactgcaacctccgcctcccaggttcaagcaattctcctgcctcagcctcccgggtagctgggactacaggcgcgcgccgccacgcctggctaattttttatattttagtagagacggcgtttcaccatgttggccaggatggtctcgatctgttgacgtcgtgatccacccgcctcggcctcccaaagtgctgggattacaggcgtgagccaccccgcccggccaccagtgctattcttaagacgcctctgaggaatcccttctccctggccattgagaatccatgcatgaacccaggttttccaccttccctgagcagcttgcatagttccttcttttaagcgcctgacttcgttttgtttggtgcccgttgtacctgagaatgagccttggatagtggagcattccagctttccagatatgcagagataatacattggctatcagctacttggcttggcctattccgtgtttaaaatcttggactctttgctagtttttacagatcagaatttttcacgtattaatccagttttcctagcttctcttgaagaatttttggagatctcttcatactgagccttcattagcccaggacagtactgctgtagcagttcatatattttttcgcttcccaggcctgtgttattcacttaagttcatagcctggtccctgcagggttgtacccgagcacagctacttagatgtcctgaatgtattaccggttaaatggaggtttcaaagaacctgctgtttttggccctgtgctcttgataacagagtgtttgagggacaactttcacatttgagtttttccaaaattaaaggttgtagaagagtcacagtatctattgtcaaaaagaaaagaatttaaaaaggcagcaattgccaggatacttcatttgagcaatgatattttccagtggaaagtcacatcttaagggttaatgccccttaactgttggccgtatttgaaaacaaaccaagctaaaaacaagagacactgacatgttgtatgacggtgtggtgtggatgttgtgtttattttagtcctgagatctagttgtaacttccttgatttctgtatgtagccacggagcaccattacctgtcaccattacctgaatggctatactgcttgctttcattttggtagagtggaaaggttacctaggtttcagtgcttgaaaagatttcagaaagcagtagtacgtctggttagactagaatcagtcctctcctgggggcagtggaatataatattttctgactgctaattaaaaatacctgtgatagccgggcgtggtggcttacgcctgtaatcccagcactttgggaggccgagacgggtggatcacgaggtcagcagatggagaccatcctggctaacacggtgaaaccccgtctctactaaaaatgcaaaaaaattagccgggtgtggtggtgggcgcctgtagtcccagctactcaggaggctgaggcaggagaatggcatgaacctgggaggcggagcttgcagtgagccgagatcatgtcactgcactccagcctgggcgacagagcgagactcgtctcaaaaaaaaaaagaaaaaaacttatgatggacacttaaaaacactcactgagtggggagtggagagcaggggtcccagggtagcctgttggacatttccagggcgactttttctttttttttttttaaagtcaagtgagtatgccatatggaaaagggtgtgcgtggagaaaaagcaaggggctccagagtgtaggatgagacatacaccttttgggttaaaaaggctgaggcaggagaatggcgtgaacccgggaggcggagcttgcagtgagctgagatcatgccactgcactccagcctgggcgacagagcgagactcttgtctcaaaataaaaaacgtttacatgtacatgtatattcaacatgtacaaatataacctattcaaaagtatttactacataaataggtacttacattacctatttactgtaatagtcaaagcctatgaagtatctaacactgatgtgtaggtactcactttgcttgccactctattaggtgctttttatgttatttaatcatgaagcctggccacagggtgcttgtgcattgagtgtgggaacaagattaccatctcccttttgaggacacaggcctagagcagttaagcagcttgctggaggttcactggctagaaagtggtcagcctgggatttggacacagatttttccactcccaagtctggctgctttttacttcactgtgaggggtaaaggtaaatcagctgttttctttgttcagaaactctctccaactttgcacttttcttaaaggaaagtaatggaccagtgaaggtgtggggaagcattaaaggactgactgaaggcctgcatggattccatgttcatgagtttggagataatacagcaggtgggtgttgtgctgtgctggtgacccatacttgttcaccctagttagataaacagtagagtagcccctaaacgttaaaacccctcaacttgtttttgtttttgagaaagggtcttgctctgtcgctcaggctggagtgcagtggcgctgtgcgatcatggctgaccttagccttgacctcccaggctccattgatcctcatgccttggcccgtagctgggactacaggtacacaccaccacgcctggctaatttttgtatttttttctagaggtggggtttcatcatgttgcccaggctggtcttgaactgctgggctcaagtggtctatcctcctcgacctcccaaagtgctgggattacatgtgtgagccactgtgcctgggaaaaccctcaacttttcttttaaaaaagaggtcaactttattgtatataagcactgtgctaaaattgcaggaactgggaccatatcctgatttttgtaataatgccagcagagtacacacaagaaaagtaactgcactagattgtgaagactggggtggacctgcttctgaaggtccagtgccctttgtcttaagatttggtgtagtgtgtctttagaaaccaaaaaaagagaagaagatcaaccttaagattagccacaaaactgggctttgatacctaggtgtggaaaagaaagggaaagagttgatgttttgtcttacagcatcattgtagaagagggtgtttttttgtttgtttgttttttgagacggagtcttactctgtggcccaggctggagtgcagtggcgcgatctcggctcactgcaagctccgcctcccgggttcatgccattctcctgcctcagccccctgagtagctgggactacaggtgcccgccaccccgcctggctaattttttgtatttttagtagagacggggtttcactgtgttagccaagatggtctctctcctgacctcgtgatccgcctgtctcagcctcccaaagtgctgggattacaggcatgagccaccgcacccagccagaagagggtgttttttaaagaaggcaaataggaaataaaaacttgggctcttaacttttgtaatgatcccaggtgtttgagctgggggttgagggtgggtgcctcgagcaaaggggctgcatttatttgcataatgccatgtaagagtagctctacaccccaaacacaggcttcttagtgggaccaaagtatgatacaaactgaagatggaatgcagaggattattggtactttggaatatgcttaaaaaaaatttttttaaagtatttttaaaaaatcaggcaacccctgaaccagagtaggttcagagaaactgccaaattttattttcttaatttgggattggaagcaagttaacagaagtttatgagttaagttgcatttagtgatcttttgccatatttgagtaataatctgatttttttgtttatagatttcttcttaaattaactttattcatcttgctaatttagtttcaaatagtgatttgtaatgatcagatttgatccatttctgtaattgctgaaattcccccgagttgctttttggctttaccgcctctggtctgggaggtgattgctctgctgcttcctgtaacttgcctgcctttctccctgtgtgggactcctgcgggtgagagcgtggctgaagacagccgtgttatgaaagggcctcctgtgctgtcgaggttgtgctctgtgaatgtcatcccctggtgcacagcagcaccttctacacaggatacagttggaatgccgccccctcgagttgtgtaaggcagcagccttggcccttgcacataagatgctgttgaatattctgcctgcaccaagtaaagggcacagatagaactgcttggcatatgttgctggggagatgagttttttgtaaagtatactacgttcttaagaatttggatcataaccatgggattttaataatagaaaaactgttgaagatcagtctggtcccttatttttacagtgaagaagccaaagcccagagaagggtgttaactttacaagtgtcagacagtagttagaacttggtggggtttttttttttttttttttgagatggagtcttgctctgttgcccaggctggagtgcagtggtgcgatctcagctcactgcaacctctgcctcccaggttcaagcgattctcctgcctcagcctactaagtagctgggactataggtgcgcaccaccacgcctagctaatttttgtattttttcagtagagacagggttttgctatgctggccaggctggtctcaaactcctgacctcagatgatccagccacctcagcttcccaaagtgctggggttccaggtgttagccaccatgcctggccatagacttgtttctgttcccttctcactgtggctgtaccaaggtgttgcttatcccagaagtcgtgatgcaggtcagcactttctccatgggaagttttagcagtgtttctttttagaatgtatttgggaactttaattcataatttagcttttttttcttcttcttataaataggctgtaccagtgcaggtcctcactttaatcctctatccagaaaacacggtgggccaaaggatgaagagaggtaacaagatgcttaactcttgtaataatggcgatagctttctggagttcatatggtatactacttgtaaatatgtgctaagataattccgtgtttcccccacctttgcttttgaacttgctgactcatctaaacccctgctcccaaatgctggaatgcttttacttcctgggcttaaaggaattgacaaatggggacacttaaaacgatttggttttgtagcatttattgaatatagaactaatacaagtgccaaaggggaactaatacaggaaatgtcatgaacagtactgtcaaccactagcaaaatcaatcatcattgtgaaacataggaagcttctgtagataaaaaaaaaaattgatactgaaaactagtcgagactccatttatatgtgtatgttttctgaaagcctttcagaaaaatattaaatttaaggacaagatttttatatcagaggccttgggacatagctttgttagctatgccagtaattaacaggcataactcagtaactgagagtttaccctttggtacttctgaaatcaggtgcagccccatctttcttcccagagcattagtgtgtagacgtgaagccttgtttgaagagctgtatttagaatgcctagctacttgtttgcaaatttgtgtctactcagtcaagttttaatttagctcatgaactaccttgatgtttagtggcatcagccctaatccatctgatgctttttcattattaggcatgttggagacttgggcaatgtgactgctgacaaagatggtgtggccgatgtgtctattgaagattctgtgatctcactctcaggagaccattgcatcattggccgcacactggtggtaagttttcataaaaggatatgcataaaacttcttctaacatacagtcatgtatcttttcactttgattgttagtcgcggtttctaaagatccagataaactgtacttgcagttcaaattaggaaaagcaattttattggacaattacggtgaaaatgaattattttatctaggtcagttaagaacactgttctgctaagatgcagtaaaaagcaggttacatttgaccatattagatctgagtttggaaaacagaagtagtctttagttttaaaatggccagattttcttgccaggattgggtttctcacttgttaaacagaacattttgttaagtttaaaacctgggatggacttaagtattcatgttcattcatgttcattcaggactgcaggttatcatgacttgtttaacttgtgggaagctgttgtcccaagttatcctggggaactgcatctggttcttgcaaaacaccaagtagacaggctctcttttacctccccttgagggcattaacattcagtagtcacttccattcagttaaccctttatttttatggtttttcttgagccatagttgtaaagcagaaaaatcatttataaaggtttgttgaacaaaattcaaaatactgttgcttaaagtattaagattttttaggattataccttacttataggcccgtcattcatttggcatgaaattttgagttttattcactttcactttcctttttttccaaagcaattaaaaaaactgccaaagtaagagtgactgcggaactaaggttactgtaacttaccatggaggattaagggtagcgtgtggtggtctacaacatagttatttgggttttagtatttcatttagacagcaacacttacctaatgtttaaaggtaatgtctttgcaacaccaagaaaaagctttgagtagtagtttctacttttaaactactaaatattagtatatctctctactaggattaatgttatttttctaatattatgaggttcttaaacatcttttgggtattgttgggaggaggtagtgattacttgacagcccaaagttatcttcttaaaattttttacaggtccatgaaaaagcagatgacttgggcaaaggtggaaatgaagaaagtacaaagacaggaaacgctggaagtcgtttggcttgtggtgtaattgggatcgcccaataaacattcccttggatgtagtctgaggccccttaactcatctgttatcctgctagctgtagaaatgtatcctgataaacattaaacactgtaatcttaaaagtgtaattgtgtgactttttcagagttgctttaaagtacctgtagtgagaaactgatttatgatcacttggaagatttgtatagttttataaaactcagttaaaatgtctgtttcaatgacctgtattttgccagacttaaatcacagatgggtattaaacttgtcagaatttctttgtcattcaagcctgtgaataaaaaccctgtatggcacttattatgaggctattaaaagaatccaaattcaaactaaattagctctgatacttatttatataaacagcttcagtggaacagatttagtaatactaacagtgatagcattttattttgaaagtgttttgagaccatcaaaatgcatactttaaaacagcaggtcttttagctaaaactaacacaactctgcttagacaaataggctgtcctttgaaagctttagggaaatgttcctgcttagtcattttagcattttgattcataaagtacctcctcattttaaaaagacattatgatgtaagagagccatttgataactttttagtgagctttgaaaggcaagttacagcctcagctagctagtaagattatctacctgccagaatggcacaaattctacattcaagggtagacgctggcacaacctacttacagattagccctttaaagcaatctgtagcattagaagatggaaccaaggaaatgtttgactgtgggttctggctgttgagaaataatttacacaccgaattagtgaaatgagtcactttctcttaatgtatttatgtacctgagagaatgcttttcaatgttaacctaactcaggtttgactaaattattcaattggaaattgtagaatattatttctgataaaccagaaataagtgaaatgctgtttgttcataaatatgtactttatcaaatgtaggagagatcatttaggagaggaaaagctaaattggaagacaaatctgtagtgtttccaaagttttaaaattatggtaaacaacagtatgttcacagtaagtggttaaaacaaccattctttaaatctcagtagagaatttttaaaaagcagtatttaacacatttccctaatgtagtttgttgcctatgtggaataactcaattagagactcacttatgccttttgaaacttcaaatataattacactaccagtttttacatgtgcatataggatggtcccaatactttaaattggaaatacaggctgtaagtccttcaagtctggatgttgggtaatcacgttttcttccagaagccatttgttaggactttaaaacttctcagtgggccagtgtaaaattaaggacaagttttataatttaaatttacagataaatataaaacaattttctctcattttctaaaggcaggaatataaggacattgccctagatatattctccccatcaaaccaaaggtcttgctgctgagtattatttaaaaaccagagtaataaagcagcttcgcctgaggatgaaggcaaagacaaagttaactgctcagcatactgaaaccaggagtttgaaaaagtaattcaaaacaacttcaaggccataaatacttggatagtgtgacatcaggtcttggcactggatttcctgcaatttcagatgaaggcttgacttggctttagatgttttcatgtgataattcttggataacctacaacgatttttcctatttaacccaccaactttaagcaaaagaaagaacgtatatgtgggggaaaagttcgtttacctctgccccgcaggggaattaaaacgctggtgaagaaaggcaacaggcaaggcttatataaggaaacagtagtaggctgcactgaagtcctcaaacacaacaaaaagctcttaggttgcaaatgttaaccttgattcttttacccttttgaaaaattcaatgggatggttggaaaaaaaaaaaaccacagacacacacacacacacacgcaaccttctaacgtaatacccaggcagtccgataatttatagtacaacgtgtaacactgggatccaacttttcacccagcaaaatctccttacaaattagggcaacatataccacaaagccaatggaaaaaaaaagaaaacctcgattgaattgcaaacacagcttttcaattgacattaaaacaactaacctttaccttatgactgagcactaaaaatcaaaagtattacatatgaaagtgagaataactacataaaatgtctattttcatcaaataagtctaatttagactccaatacagtattaacagctcaaactttgacggtgaacaatccttttccaccttaatgcagtgtaggaagaatagcacacattaaagtttgttacgaaaatagagtttattaaaaacatccctattgttttgaggagctttcaccgttaccttgtcttaaattaaaaaaaaaaaaaaaaatagagagcacttctaattacgatttgtaaactttttaaagtcaaaacttttaaaaagttacagcaaaaagggtaatatttattcatattttcagtattttttgttattttgtggctatttttaaatagaagggaagcaatcaaattgcttacagttccccaccagctggcgcggggctgcagtacagcgggagcggatataatacagcatctgtacacctcaagctctacactccaggaagtgtcactgtcacattttcacaaattccagtctctaacgaggagcctctgctgctgagccagaatccttttcgggttcaacggatgaggtagcctcagcaggtaactcttcagaaggctttaggactgcagcctcagacacccccttctcaagttctgaagcagtgtctacatttcccacttggctaatgggaggttcaacggttttgttaccacctgccctgtctgtcacctcaggcttttcctttcctcgggcttcttccttctctctacgagactctctatctctagaatctctctctctgtctcgatgcccactagagcgtctatttctctcttccaagtctctgtgcctgtcccggtcagggctcctccttccccactctctcctgtcacggttactattatctctatcatcattacggttcccataccgttcccggtcattttccaccctatttccaaaagatcttcttccaaacctttcttggtctctacctgaattgaactgctgcctgttatcatttctaaactgctgtggctgctgctgtgttggtggaggctgttgtgatggtggtggctgctgctgctgctgctgctgtggttgctggggcgcctgcggctgtggctgctgctgtggctgctgcggcggctgttgccttccgtctctgtcttcaggaccccctgggcctggccctgggcccccgagccctggcattccaccaggcctaacaaaggggccatgcggtgggaagggacctttcattccatgaggtggaggcatcgcaaagccccctggtcctggcggtgggcctctgtgcatcatgtgcggtggcatgggacggggcggcatcaaagggaaccgctgtaagtgaggtgggggcattcctggagggcgctggagtgggatgagaccgggccgggcgccaagaagaccagtagatggtgcctgaagtccaattacaggaccaggggcaactccttgagtgcctaaaagacgacaaaaataaaaatgtaaacaccaccgaagatggcactccagtttcagctgtgttctgtggcgcttaaagcaaaataaaattcaacccacaatcttcaaatttcatagtttgccactctgtcacaaacccagtgtgaggcctagtaacaacctaaggcaagcaattgcaaagacatttttaaagtatctaatacaggtagaggccagaataaactgggaaataaaatagtaatggtaataccaattttcaaagagtatgtcaaaatctcctgtagctttcattagaagctgtcttcccactccaaatacatttgagaaacacagtgtgctaagtcctaatgagataaatacattcactatcagtaactattcaagctaactaagcatactgcaggtgcacacttagaaaatttacaccccgtcttattactagaaaaaaatgaggtcactgacctagaaaacccaggaaagaggaagatctctttgactccatgctacacttagtccatattattaaaatgcctcatgcagttactatgcaatgtgcatcaaataaacactaatgtctacaaaacaaagatccatacacaaatgtgaagtttactgttacagttcctttttcaaggcacagcatgatatttaacttgcgaggccatcacgacctgaataatgctcaatgttcagctgttcaccttctattcattatttctattcattcttccaaaggtggcaagtctggtaaggttggtgctgctgaaataacaatgacttcttggttttattttcctatctacatgagggtttgctcatactgatataagagtcacgcaagttcaacaacctgtcattttctgcttggggttcaccacttaggtacagaaaagcattggaatctctcaatttatccttttgcaaatataaataagacaaatactataatactatgattgaaaggagttattctgataatggaaaatgttccaggtactgttaagaacatgctatttacccatgtgctgcagaaaggtctttgagcaagttatgggttatgatcagttagcaatggtaagaaaaatacttgggtgacactgacagaaaaatgaccaattgggaaatgctgattaccacagcaaaagcgccagaaattgtgaaatggatgaggtgatggctctgtcccttcacaggctcttcagacactttgggaaaatcccaatgaacaagtacaggacaccagctacactgtatctcagatagaaataaaacactcttcacatcatttgggaaatatttaccgagtatataccatacactggggcaacagaagcacatgtccttgctttcactttgtaaagaaatagtgtagttccaacacctgtggactttaatccaaaacataaaatgtatatgcccaggcacagtctcttttaatagagggatcattatatagaaacacctgaaacaaactgaactttactttcccattaccttttatcagtaaagatttgttttccaggactaaaatgaccaatgtttactgttaacggaggtcagcatagaacattctggtgcctatctataggttcaagtggccaagccaaattataatataacaccagaaaaacgggggaaacagtttcaaagcatcttattataacaagagaatttagttgagatgagtcttcaaaaggaaagtgattcctgaagggcaatgggaaggtcctactcctgatgccccattgacttggcttcctcaagtatctgacagtggccaaaggatgcaaagccacctcaactttgtacagaagagagaaaatgggccctgatgataaaatacaaaccccagactgaaggaccacatctcttaagtactttacagcattcatttgagggtataaattaacagggttaaaatttacaataatcatataaaccttatataaaagcacaatttttataaagaattgcctacttgtttgatacatgtggatatttgtgtgtgggatttgcttaaaacattatacactcaaatcctttcccttcttcgtaaataaagctaaaaagatgtggccagctgggtttccttttaaccctttgagagccaactaaatttatagattcctgatagaatatgcccatagccccagatggccttcagaccacaaaaaaaattttatctgtagttccttttattcccttttgcagtgaacatgtaatgcttttataaccagttatattaaaaacacattaggtggcagaagactggcaagcatgctagctaggaagtccttattaggaaagctggcattaggcataaaccatcagtatattgtgagttacccaggtgaaaagggcattcaaagcaattgttcatttcatttggaaatatgacgtgtgatatcactgatgagttttctaaagttataaatttttaaaaaacccaattcattcatattatgtattaaatatctgaattttctattaactcatttaatagtcctttccttcaaaagggacagtttggtagaaatagacaaatttcaattgctgtaggagatggcacaagctagcatggtggtatagaggtgggactcataaagctggtgtgtgaatctgagtggcagtcatcgggggtgtctgaattggatctcaaaggaaaatgcacaaggccagtgagttaaggaaggacgttactatcaagacattactagcagcttttgaaaaggcatatagcaaggtaaagcagtggtgtgtgtggttcagagaaccacaataaaatgacttgatgaaaactaagaagaaaggagaaaatacagatgaggtttatgaagctaaagagataagtcagggcaattcacaggccctatatgccataaggaggaacctggactttgacctctagtggtgcagaaaaccaagtaatttttagcagggataaatgattctatgattgtttttgatagatccttctggcaagtagtgtataggatagctaagaggggaaggcccctcgagagtagttaggcacttattcggagaatccagcagtgacagtgatagtgacaagagactgaagtgagaggtgctagagatggaggacacactgaagacatttagtggacaggaaggacagggtgtaagcgatgtaggaacacagctctctgccttaactgagcggatgcagctgtcaacgcaagatcagaagagtgatggtgttaactcccccggaatataggtgaaacaaaaaagggctcagacctgggaaacaaatttttaatacagcgaggcattagggcagaccaaaacagtgatggctctaagtgcctgaattcaaatttgggaagtatggaaaacacactggagtttaactaaaaataaccaagaatctgtaaatatttcctatgacgatccaaaaaacagttgatttacaattacaaaagggggtggggagacaccattgccatctacagcaaagatgcctgaaatggtgtgaaataaagaacaagtacattaaagggctacgggggaggtgggagaaaggaaggttgatttcatagttggagtccaacgtggaccttgaaatctccggagaatgtgcataagggatacaaaaggcatataatgaatagggtggctttctgtcaaggaccacagagtgtacgcagtcagggagacagatataaaacataaaatgtaaaaggtctgatttaaatattgtgggagtgaccaactgcatcagttgcagaggattttgcagaggatgcaaaatttcagtgagatctttacagaaaaagaggaacgactcagttcctctacctgttttggtcaacaaccctatcttccattctaccagagccaccatctctaggagctctagatgtttgatcactaataaagtcattacttccaaattcccaatttcaagtaccccactctttacctgcttctcctctttccaggttattctctccagatctcctttccccaaacaatcttcaatcccaccaggctcatgcctcacaaggcccttcatgtttttatcttaatccttacctgctctggagtccatggctctccctcaccatatctgcctggaaaatccccaacattggttttaaatgcaactcttctgcctaatctccacctggacatggagtatgctgactgctctcatttcaaatttctgtaattacaacccaagtggacccttcattctggccagtaatctaacattttcctagtcaatccacattctcatgtcctggatgaggacacatgttcaaggtcctccttcatcctgtctactcttagttgttttgtttggtaatttcagtaaggtaaaattcacacatcctgtaatttacccacataaatgtactattcaatggttttagtatattcacagaattgggcaactatcacaatcaactttagaacatttttattaccctaaaaggaaatcctgcatccgtgggccatctctatttccccagctttcccctcatctgtcccagccccaagcaaccacataatgttttctgtctctgtgggtttacctattaacattctgtataaatggaatcataaaatatgtggtcctgtgtgactgacttttgcttggcgtatcttctcaaggttcatccatgttgcatgtttaagtccttcattttttattactaatattccgtgatatgaatataccatattttagttaccctagttggcttatcatttttttaaaaaggtctttagaaaaagactttttcatccacccacatgccaccaaatctaccaatttacctgcacctgaatccacattactcctactgtctgtgactgtccgtgctccaatggttacacctgttatttgtaccctggatctgtcccctctcacctacataacaaccgagcacatagcccttcttgcttgcaccaacattctcccctctactgggcttcccaatcataagtatgctgtagtttttgcccatctttcagaaacaagaacaaaaattaaaaactccctcaccctgcatctcctttcaggtatcaccccatcttgtttttctcctctatagcaaatctcctgagatgttcaaaatcctaattgtatccttcatctcccagtctctcacaaccctatgtaactgggcttttgaactcatcaatccaatgaaagcacttttctcacagtcaccaggagccttcattttgctaaatccagctgccaagtcgcagcgctctttcttgatccatcagtgtcatctgatagttcacctctctccccctctttcctgcctagaaactctacttggctttcagattatctccctctacatttttatcctagcccacgggctgtaccttctcagcatcctttgctggagagtacagtatagatagtggtcaaaagcacaggctcctgttggagtggggctaccttgaattctaacacggctacttgtagctatgtgacccttggaaggttatttcatctccaagtgcttcagtctccccatctataaaatgaagataaccctgagggctgcaagggttaaatgattaatatacacaaactgcttaagagtttctggcacgtggaactatgtctaccttagtctcacagcatcatattcttagctgccaaatgctgaagaattttgtcctcagacctctcaccacttctctatttacattttctccttaggtaatctcacaggctcctgcggctttaaatattatctttatctgctgaagatgccagaatttgcagctctattagatgttaccagtagtttacttgacatctgtacctgggtatcaaagttagaatatccaacattttaatttgataggctcccctcaaacccactcctacagatttgcgcatcacaggaatggcaattacatctaccagttgctcacataaaaaacgagtcattcttgactctttttcgcattccgtatttaagtaatatggcaattctgaaggctctatcttcaaaatatcttcagactctaaccacttatcacctccattgcaccagcccaacgtgggctagctcccatctcatctgctgcaacagcatcagaaccggtctcctttccactcttaccaacttctagagtctgtttctctaacagccacagtaatactttaaaaactgcacatcagatcatggcatggataaaagactctacaccatttcccactgcactcaaagcctagtgctcaacaaccttctctaagctcatctcctgccactttcttccctttgctctcccttcctgctgtggtccttcaacaatccatgccccatctcaattcaggccccctttcctttggtcctcactctacattcctttcctctgtatttacatggggatattctcttcattactggttcagatgccttccctagcaatcgtatttaaaattgtacatatccgtgttacacccttatactgcctaactgtcctgttttactctccatgttaaattattagcccaggtctgcgaaaatataaactccagaaagacaggttttgttttgttcattctggtatttctagtatacctagaagggtgcctggcacacaatggttattgattagatatttattgaacatatgagtgaatggtgtttgcagaggtgatgaccaaactcatcaaggagaagatacctctcagggaattaagaatagaggctacaagctccaggtcttttcccagggtggtaagaatcttcccagcataaacctaggaggacttgaactttgagaaaggatgttttctttcaacctccttttctgttctttgttgcagttccaccgttttgatttgatctctacagaatgagtgtcactgtggcactttgcatgaactaaacatgaacttttcccacatgaagaaaaagatgtatcaaccactcatctctttcatcaatacctgaagatccctaagcatatatccctaggttttttttttaatcagcaagtattatcctttttccatttcagacctgcagaaaactgaaataacagtacaaccaacatgttatttcctttgcatagattcaccaataacatttaggcctatttattctgaaaacactcctgggttattcttatagaaggcactatgttctgagagctgcggaaaatggaagaataaggagccaattttcaaagaatgagaaaaagcatctttcagattgtattatacattaagattatattttaaaaatgatgcttagaatgttagcaagagattcttaagagaaatttgagttttcaataatatataatgcagatatactgagatgtgactcatctatttttggcataagggtatattttgataacatctaatacatgaaaaacagaattataagtgaaattggagaatgattaccttttttaaatgcttggttttttcaaaataatgtacagtaggctctgcatggtcaacttcctacagatttgctttttggaatttcagttagcataataataattacttaagtatgttactataattgacaaagtgcaatagctatgagttaaaatttcactattagagtcaataaacttgaaatctaaagttaactttctatcactgaatgagattatctgtaggcaattttattttcaatattagccggaaaaaaatcttacctgaaattctttacagcaattaactttgtctaccaaaatcaatctagagcccagagttactgcccctcccaccttcctcaagatgtccctcagagagatttacatttaagccattcttcagacttgcactctggagcagcctaacaagtgacagcccaggagaaatggagacaatgtgttaaaacatttcaaggttttctgcaagactttctccatgtttcatttgaagtgctttgccttgggagaaactatggtgtgttcatgtgtaaattcatatccacgccaagtatttgttctagattaatcactattttgcattatccactgtatccaatgaacaaggttatatactaagttgaaggtactgtaattcgtatttaagaaccatttctactatataacactagtggaataacattaatacaataattagagtaccaattcaaatattttaaagctttcaaagaagaacacttttataggataagtaaacaggctttttgggtaccaaattaaatacctgatatatcactctagcttataatttaatgtaaccaaacatcaaaattcaaacaaaattaaaacacaaaaattgttttttaaaaaattacgtattatgttagtactttgaaaactctactttctagaattttcttcaggcttccttttaatgtcagtggctaactagtgcattactagtagactggtgctttaatattctagtaagtgttgctaaaaatgagctactaaaaaatctaaaattctagacagaaactgggcaaagaaatccaaacttaagtgaaatcatcaaaatcaaattcctattgatattgctggcaaagttattcatcttttaggcagtttcagggatcataacgatagcataaaaacatttgcgcttgtttaaatataattcacaaaccaattctgtccccacaatttcctgaggtgtccaaatctggaatcatcaactcaaatgtctactgaagccatgccaggactgcagcgcagcacaccactgcctagtaatttagccacaggccaccaacttgttactcttgctttaaaacctttggtaacaaaaattacaagtaggaagtgatcttacaaatactcaactcttatttataaattttaccatcagctacagtagtgtgacaaaaactggtggtaatctcttcatattgataattaatgaataaacatacttgtcaagaggctttaattttccataaaaggaatgagttcgacctagaacagtttttgcttgaaaagatattttggatatactggtaacacagtacagataggtaacacaaacaaacatttttttgtgtattcttttttattgtttggaacaccaaagtaacccaaactttacatttacaatgaactttttaataaaaataggttgtacatattagagatacatgttatacaaaagtttttgaaaagtaaaacacaaacacttatacagtaaagagaatgaactgaattgctatcatttgtaatattccttctctcctaagtgaccaacaactgtagaatgttacctttagcttttatgaaactaccaccactgtagctatttgggtgtgtgagatttctttaaaatcaagtaataattattgcgcatcaagtaattttatattttcagattatcagtattactaaaagaatcaaaatctctaaaagttggttttattccctccaaattcagtagtacaactcaactaattactcccaaactaacacccgcacttaagtctgatgatacaaccaaaccatccttaaggcacccactgcctctttccagtataatcaggcttcactacagaatttttggagacccactgaacaactgtttggtgcctagtactttaaaaatattgccacatttcacaaattaagatccaagaactcagttaagtctcgctcactggaaaaactacagatatctagtaggtgtgctatttatcactaaactgacacattttctcattaagccaactgatggaactttaatatgtgtaaatttatgatctaatctatctcgaaaatatctgaggcaactatgtcaagataaattttttcctaaaaagtaggccaggtgcggtggctcacgaggtcaagagatcaagaccatcctggccaacatggtgaaaccctgtctctactaaaaatagaaaaatcagctgggcgtggtggcacgcgcctgtagtcccagctacttggaaggctgaggcacgagaatcgcttgaacttgggaggcggaggctgcagtgagatgagattgcgccactgcactccaacctggcgacagagtgagacacatctcaaaaaaaaaaaaaagtttgcttcctctgtctgccaatataacagtttaaaacgaatcacagatgaagtaatgtaattttagaattgcaaaagatattcttctctaggtcttataaataacatctatgacatttcttacctgtaatataagcacccaccactcactaagtgcctgccctacagcaggccccaaagcaagtgttttatagatgttagcccattaaatcatcgtgacaccattgtgtttgtcatttttctccccctttagagatgagaaaactgaagtttagcatcaacttctagacttatagttttctggtgagcataacaattccttttattatcttaaaagaaaacattagagcaccaagaggaaataccaaagcatcttagttctgggattccatcacttgttatcccaacctaattactgatcctttagtactgcaatactgcagtgtggtcaccacattcctttatcaaaatgataaaactggttagtcttagatgaacccttcttaacttgcatacacatttaaaactcattcctctataaggtcaaaattcctgtgatattcttttcaagactgctgactgaaggcacatggaaggctttctttctcatgactgaactaacatattgcattttagttcaaagtgcttattttaacaaaattgttttcacttttcttatgtcaaattctaaacccttctggatttagaatagccttcaattttaaaattctgttttagaacgaagataatcatcagaagtaaaatatgaacagtcctgcattgaaaaccacccgctcatgtaacaaatgttcccctctcatgggtccatctagtgggaggaagatggacatgcaaacagtatgtcaggtgatgataaacgctacgactgattcagaatttaattacttttctagccatgcctagcttactatgtttttccaagctcaccgacttctcatctgtgtttggttgcacatgttggatgcagaggttaaattgtatgttcagtagtgataagaaataacaggcagggtcttcaagacctaaatgttaaatcacaggcaggctacttactacgcttcacagttgcttgaaagcagtggttattaaactcctggagttcatgagatcttttcactcattcaataaatttattaaacccagtaaaaaacacaaatgcagcaattttacaaatagtttcaggtagtctaacatccatggaccttagattaggattcataatcaagggtgtgtatgtgggatgtgaagaaggggttgctatccagattctgtgattcttgtgcaatcatgttaatatgaaaaaaaaaaaagcataacaaaaaagatgcaaagatgttccctggttcctagtccaatgttccttctatgatatgacttccattggaaggtagacctcttaagcaacttcctcattaaacaaatcattttccatcattatggtaactacactcctgtatcacttgtgataaattttaatcccaaatcctcttttaccattacccaatctgtgtactaagggaaataaactcaaggctattatcagcctaagcttagtctaggggagggcagaatacagtataccatttaaaaacaaattgtttttttattataaatatagtacatgcaaaaaataaaaaattccaacagtactgaatagcataggtgaaaagtaaaagtcctccattacaaaccaatgtctcacagtcctacatctcagaggtaatcaataggttctttcctaaaacaactcagattatgaaagcaaacaggcatatgcatatacctttgaaaaatactatgggctcacaggactagaacactgtaatactctcaagatattaacttccagttaggggattcaagtgttaattatatttggcaataccacttcaaatacaacaatttgttaatttaaaagatggtctactgtaacaagcatgtgatgtatttattcataacttaagcaggcaagagtaagcctgcttaaagatgtaaaagatctaagtcacatcgcccttgatcacagtattgaagttgtgggtaaaaagtacaacagataaactccagccaagtaaactgagagtgagtgggaaagtggtacctcaggctgcgcaactgttacttagaaaacaaagccattttattggaatgtatcaaagatgatttctttgctagcccacaaagaacgctacccaagtccaggggtttcagatagataataattggtccagacagagaaaaacctatgccgttaaagaagtatctcctaaaagctgggaagagactaaggttaagtgaattacgaactctgtaccaattcctttgcacagagattacttttaatcatttttctataccaaataaggatgtgaagatccaaacttttattcaagacagacaaacatgattttgtctttgagattctctcttggtaaagatcaagtacacatatttgactttaagaggaagatcttcctcaaaaacaaacaaacaaacaaaacaaccaaaaaagccagtcttggaaataattttaccaaaattaacattgtttttttaaaaaaatctaacttggggatgggtgggggggtggggggggggtggggcaaggaaaactaatgataaaaaaaaataacttaccaagaagtgaaacaggctgggttacaggaggggtgggcagattcgtgggtgcagcaggtggcacggcagagccatacattttcacgctgtcaccagactcggcgtttcctctagccccagacaccactgttggaatgggatttccaatagataagtcttttgtagtgtcttcatttataccagcgatagtagctaaggaatataattatatcaacatgtgaagctgaataattaattatctcccggtcaacattcttatgccatactatagatcctattaccgcttcactctccctcctacacccagctccaagaggataagcaaacacaaagaaaaaaacatgcttacagtttgggatgcttattggtggagtgtgaggaggaggaatggatactggtggagttataggaggtgggggtccaggaggcagaaaacctagaataagaaaaataatgtcaacttatgctgtatcactccatcgcaggctctaaagtatgttcacagacaatttagtgtacctggtggtaaatgcattgggttgaatcctgggcgcaaaaatggtggaggaggagggggaggaggaacaccaggaccaaagcctggaggcggtattcccagaggaggcgtgaaagcaggcggctggagagcaccaactacaggtggacccggttgatgtggtgggacctagaaagaaagataaaagaataaaccacctatctagacaccctcccatccacacagtaagcacagataaaagagcaaactgttgaaaaaatagatgtttcttaatttgtgcttattagaccaatttattaaataacaggtggtagttaacttctattcataccaactgatagaaatcaaagctgtgggccgggtgtggtggctcacacctgtaatcccagcattttgggaggccgaggcaggcggatcacctaaggtcaggagttcaagaccagcctggtcaacatggcgaaaccctgtctgtactaaaaatacaaaaattagctgggtgtggtggcaagcacctgtaatcccagctactccggaggctgaggcaggagaattgcttgaactcgggaggtggaggttgcagtgagccgagattgcaccactgcactccagcctgggcgacagagcaagacttggtcttcaaaaaaaaaaaaagaaaaaaaaaaaaaaggaaagaaagaaagaaatcaaagttgcgctcttcactttatgacagcaatttcacactatatttcaccagtgtttattggtgttctgacatcatgtaatacattttaaaatgttccatggtcctttcagcaacacagctttaagacaggctacttggcaatttacacaatggctaagatcacaggtcctggagccaaactgtctgcttctcccacccgctttagttagctgtgtgaccttgagcaagctatttaaattctctaaaacggcaaagtgccaaccacacataattatgcagattaaatgagttaatacatactaagtgctggtgcctggcacttaaatacccaacaaacgttagctatttttttttttaagataaattttaacaacccccccagccacggaccattaccagtctatggcctgttaggaaacgggccacacagcagtgggcaagcaagcaccacctcctgagctctgccttctgtcagatcagcggcagcattagattgtcataggagcatgaaccctgtcgtgaaatgcacatgtcagggatctagcttgtgcagttcttatgagaatctaactaatgcctgatgatctgaggtggagcagctttatcctgaaaccatcttccactccagtccatggaaaaattgccttccaagaaactggtccctggtgccggaaaggttggagaccactatctgaacagatcaggcagctttctgtaaatgagtgctgacacacattgaattttgcttagaacctgcactggaggggcatatccagaaggtcagctgaagagtttgccaactaggggagtccatttaaatcacagccaagaatgtaccaaagcatacagttttcccctcacattgagaaaatgaagacacaattcactttcatgatagctcagatttatctgattcagatttaatgtgagaaactgaggaaggaagacaagaaaaatccagtagatcacacatagaactatgggtcaagttcttataattttcaaagggtttttcatttttcggcccttatgacgtgacaaaaaacatactgagtacttaacatatattatctcatttaaccctcaaaacaactctaacacatgaggaatgccaaagccaggaaagggaatttgcacatttacaaataggaaactgaagcttataagtgaagttacatgccaaataccatactgctgaatataaacaacagagttgagaattaaacccagttctaccagaatctagtattgcttttcaagtaacaggttggctgactagacagcaaatattttataataagaacacatcttcatgttaaatggcatttattatgaagttttcaatccatttaaaaatttcataaggatagcatccaaggtgaaaattaagaaaatccctgtccctcaaagcagcagcttattgggtacatatccaagtttcttcaggacacaaagtccctgaagaatgaagactcagaaaaaaagtaggcagagcctatgaaacttgatactgaataatctggatggatagatgtaagacaatatacatttattttggttgtataaacatttatgggccaggcacggtggctcacacctgtaatcccagcactttgggaggccaaggcaggcagatcacttgaggccaggagtttgatacgagcctggccagcatggtgaagccccgtctctactaaaaatacaaaaattagccaggtgtggtggcaaatgcctgtaatcctgtaatcccagctattcaggtggctgaggcaagagggtcggcttgaatctgggaggtggaagttgcagtgagccaacatcaccaccacattccagcttgggcaacaaagagagactctgtctcaaaaaaaaaaaaaaaaaaaaaaaaaaaaaaagtgaagaatataaaatttaaatctgataaaacatgaaaaatgtaatatgcacatatatgtactcatgttttttactatgaatccagacatatatctacagtaagatttagaaagggacctttcaggcacttaaagtttaagtcatgtcccaatattctcacctgtggaggtggcactgttataggtgcaggaacaggaataggagggacaggcacaggtaatggtttaggtatgggtgatactggttctgtgtgtgaggtttcagcacctccattttgagcaacttcattttcaggcttcttaggaattcctttccaatctgtgagcgtgaaagaaatttaacaagagtttaccattttcagtttgtaactttaaatctagaaatgaaaaatgttgattataaaaacctagcccagttattaaagaaattcccatgctaattttagaaatagtaattatttaaattaacaacaatagaaacatgtaaaagaatgcatactgtgtgccaggcactgtcacaagcactctatttatactagcttatttagttctcacaaccatttacaagtagatactactattattcccatttcacaaatgagaaaagcaaagacagcttgcccaagatcacattcttggtaaatggcagggacggattcaactcagacacatttggttctagagtccatgttcttaaccacaagaatgtattatttaaagtattagaaataaaggataatgaaacacccaatatttcctgaacacatttcactaatattaaagaataacttaaacttcccacctatttccacatatcttctagtcaagtgaaaacaaaactgtctttctgctccgtcctctgaggctctggctccatcagattctcctatattcttgagcttttcaatacattctccactggaccatgagccccaagattacaccatcttcttctttttaccactgtctagcgcctcccagatgtccagcacatagtaggccctcaatacctgattgccttaacacaaatctagctctatccttagatgaaggctttgtacatccagggagggagtgggatgtgggaatagtacagcattgtttcatctctttttggctctgaaaccgtcactcctgcttgaagcttcctttattttattttaattttttgagacagagtcttgctctgtctcccaggatggagtgcagtggcgcaatctcaactcactgcaacctctatcttctgagttccagtgattctccagcctcagcgttccaagtagctgggattacagacacccgccaccacatccagctaatttttttttttttttttgtatttttagtaaagatggggttttaccatgttggccaggctggtctcaaactcctgacctcaagtgacctgcctgcctcagcatcccaaagtgctcggattacaggcatgagccaccgtgcctggccttgaagcttcctttaaatgttctttctgagggcggtgagggtgagcatggtggctcacgcctgtaatcccagcactttgggaggctgaggcagtaggcagatcacctgaggtcaggagttcgaggccagcctaacatggtgaaaccccttctctactaaaaaaaataccaaaaaaattagcatggcacggtggcacgcgcctgtagtcccagctacttgggaggctgaggcaggagaatcactggaacccgggaggcacaggttgcagtgagccaagatcatgccactgcactccagccttagtgacagagcaagactccatctcaaaacgaaacaaaaacaacaaaaaacattctatactgccatgccatcctatgctcctcctgttcctctgtctagcaatctccaggtcatgcccatgcattctgtgattttcccccctgcaatctcactgtcaatctggcattttaaatatttatgcccacaaataactgcaattcattgtcttacacgtttactttagattgcttctctggacatctaaaactttccaaggtaattatcatgaagcactggattaaaacccaataccaggccaggtgcagtggctcacgcctgtaatgccaactctatgggaggtcgaggtgggcggatcatttgaggtcaggagttcgagaccagcctggccaacatggtgaaaccccgtgtctattgaaaatgcaaaaattagccgggcaaggtggcacgcgcctgtagtcccagctactcgggagactgaaggaggagagtggcttgaacctgggaggcagaggttgcagtgacccaagattgcatcactacactccagcctgggctacagagactccacctcaaaaaataaataaaaaaaaacataataccaaagatgctcagttaagacctatatgatttattaagtttcacaggaaaagttctacttaattctgtaattcatagatcccataatcagttaagtatttcacttgtgtttgcatctcttttgtctcattcactatttaaccctcagtttataatggagatactgacacaggagggatcctaaaaaatctcaaaaatcacgtcctaatgcaaggaacaggacattcgatttgtcatatgtactaccaagcaaataagtgaactgtaagagaaattaaatactgctttacctgggttaagtgtgtcactgtccaacattcctccttcacaaaaactctccagttcctcaggcttgactttgtcccatggaatataagtaacaccaagttctacatcccaatactgcttataatctgcctttattcctttgtttaaggcccaggcaatctatttcaccattagtgaaaatataaaaagaaaacaaagcaaggtcgtaagtcttgagggtattattctctatcattctatccattccgactcgggcaccaagggagcaatctggaccagctaggcttggatctcattcaaagccttattctcactacagaactggttaccctttaattctcactttgtcctaggatggaaatttcactggcatcttctccttaccaactctcacccaacccagccaacataaaacttagagaaaaggaaaaagtttaacagggaaaggctgaagttccctgaatagcctagtagtatactggggactacttttccaagtctaggggtgccttgtaattacttaacatcagacaaaatctttttgcagtgcaatccagcggtagaatggggtgttaagacactgaagaaacactgactttagctccttaggggaaaaatacccatatacctatatgtttttctccacctttggtgaatatttttcagttaattctaagatggcaaactttaaaaatacagtatccaaattttttgaacaggacaaaacatattgctaaaagacattatatttaaagcactaatttaccatgatgaacccatctacatttaggaaaaacaaaacaaaacaaattctaccatgcacgtaacatttacaattttatgctgaaacactggagttcttttaggaaatattctttaaaaaaaaaaaaaaaaaaagatgcacatgaaatgcctcagtgttgaaagtcatttcgaagacccaaattagtttttatatgccacatatttttccccttctgcctatttaaaaaaaaaattaattataacatgtaagactgtacctttatggatttctggttcactttatagtttcctcggctcagtttctgcagggcacgataggcatcttgcctatgaaccataacaatataggcacaacccctgggaggaatcatctgctccaaaacattttaatattataaaagataacaaaattgaaaagcaacaagatacaacaccaagtaagcagttccaacaatcccatccctcaccccatgctatataatgtaaggttaaattcatttctaagttggcaattcaagtttggtctcaactgagtcctccaagctttgttatataaagacttacctagaaatgtttgaaattaaacttggttatccaagaaatgttaaatacaaagaattctaagaaatgttaaatacagataattctaaacgtggactctgaacacctaaattctagtcacatctataaacctgggcaaattgtaactttggtctcaggtcctccatttcataaaatgacattaatcacacctgtccatcgtacttaaaaaactgaataaacactcacattaattgattcaattggaccaaactcttccaagagactggcaacatcctgctgagtagttcttttgtccagctgccccacccagagggtagtactgcaaacttaaaataaaattacaatcataaagagattcacatttgataatgagcagcactgtagcttacattaaaaaatcattacacaaaatattcatgaactatattacaacaccacaagtttaaatagtaaatctcacatacattttaaaaattctagaaaactgcattagtacttccagaaagagaactgggatagtgaaagatatacataaaagttggaaaaaactggtttttttgtagatggatctaaagattacatctataaaaactgaagccagggaagcaataacttgcccacctcaccctgccaatgaacagcagaactaggattggagctcaagtctcttgattaccaaccagctcagtgctttgttcacttgcatgtaactgtcctttctccactcttaagtgttgatggtttttcttttatgttgtgtcctaggtgataagccttatggaatcagaaatcttacatatgccctagtcatattataaattaaaatcttagtcatcttaatagttactgatttatatcaaatatatgtctagcacaccttactaaatgtattctgaagacatctgatgagattcagaaaataatgcaagtgaatacattctgtaaatttttggttcactccttactgctgctttatagctggtttaaggtacgaaagcaaatctaagggtatacatcaatgaataaacaaggcacaagaaagcaatatttcaaataaaaatcaacacagtggtaacatttcttttatagttttgctaacagttataaaacactttaaacccaagacatgaaaaaatagtacatgaggtttgaatataaaggttgagttaccacttgcagtttccggtttcacttgagggaggcctttttgtcgacgttctctctctttttctcgatcccgtctttcttgagatcgagatcggggagaatgtcggcgtctatccctggaccgagatcgagaacgtcgatgccgagaccttcgagatctagaaccagatctagatcgcctcctttttggtgacctaatgttttcaagagaagggagaatgcatagcatatagacaaaaaccagaaaatataagcacatactaattaaaacagaacaaaaactaggtaatttaatgtttgggtatgtaagaatgcaatacctgagaattcattttacagatttagtatgtcccaaattagaaatcatgcacattatttaaataaaatacacaatgttgacagcttatataagtatctgtcatcttcagtgccgtctggtactatataaaattacatccttgtaatttaagtagctaattttcacagttgagatacactgctactactgttacctatcttcttagtaaagtcttttctgcagcaattaaaaacattctctgattacagcattactgtgatctttccacttttgctggctgataaagctgtaatggaactttgaaaatatagttcttctaatatcacatactgattacctatgtatagaattatatcttcaaaattccgttacatctgagcaacttaaatatagggaaaaaaagtaagatgaatgatgtagtttttttttttacatcaatacttcacctgcccccttctacacacatatacaaatacaaacataccaactgttattttactaacattctgaatatctgaaaataacccaatctaattttaatttctatgtcccctaagatatacagggttggaaaaaacattttctataaattacctggatgctgacctagatcttgactttctgttatcagacatatgtcgcttaacctcttgaatacaaggttgttctacttccatttccttaaaaaacaaaaaccatgataaaatgagaaatttaaaaagtataaaagcaagaggacaaaatctaacaaaagctatattaaaaatctccttccctgaagcaattctcttttggttgcctgggaccaaattactagtaacaactggccatcactgggaaaaaaaaacaaaaacaaaaaccacttttatattgtttaaaagattaaaagaaatatttctctacttctggtaaagttactttgcttaaattacataccattttaataaaccattatctaatgcagtgaagtaggcactagttaagccttcaacactctatatcaaacctcacagaatcctatggaagttggcagtattagcatgtccactttccagatgaaaaacctggagcactgagagggtttaatatgtacccaggtctttcttcatattcaaaaatgaagacagcaagcaaataaggagaaatctgcatataagtcaaggcaacaaaaaaagataaaactatctgagaataaagttttacctgctgatgcggcttctgtgtaagtggttcattttgtgcctgaaaagaagcttggaaaggctgctgcactggtggagttggaggaatcacaggctgagccatgggaggaaatggaggtgtaggaagaagtccaaatcctggcatttgtccattaggaggaagtggaacctttcatttttaaagaaagtgtatgagtaatagctatcaaaataatttggaaaacctttagttatataaaactaaaatatcctcaataaagtttgatcaaggaaaagttacaacgacattcaacattgtttaacaatttccatatgtacaatttccacgcaagaattgttacataccaagtatataggttaaaaatcctgtaactctttttaaaattatgaacacacaggtttagttttaaatatttaaagaaataccttcatttacataaggaagcaatgtgataaactgaacttcaagtcagaagtactccattgcaaatggtctcttttcagctttaaagacaattaagccttttgggaggaaaactggctatctagaagcaatgacttctaggtttactttaaaaaaaaataaccaagggggaatttcaactaacatacccaacttttagagtttcaaataaagtatcataataataatgaaagtaaactacaatctaacatatttctgcatgtcagtttaaacacaaataaaactataaatataatgctttaagtattctttctaaattatttatgaactttcagtaattgttaaacacttgaaataacaaaaatgcttcccaccccatccccataatttagatacagaatcaagtttaagaaacactcaatgagagaatttactggaacaaatttatctctactaacttcctgcaactctccagtgtgctatgtatgctccttttattgcggatttcaaactatattcctgaatgttcagagctcagagccctctaaagtatctaaccacacaaaatacagaaggaaggcccttccaagggaaaaagctgtataactaaacaggtcggtttcttcaaatagaactgtaatctctacattattttaactaaaaaaatgcctattattaaaatatgagcatgtgattttggcatccttgttttaattacagaaaaaagcaactcaaaatagttacgtgttcaacagcttttatcagagatatagtacgacttagccaattacatagctgcagagtgctctgtggaatgcaaaccatacgctc
